United States Patent Application Publication US 2013/0031665 A1 - sequence listing, part 5

SEQ ID NO: 15466 - DNA, 1073 bp, Glycine max
  Gm_smallRNAprecursor_8299
accaaatatcaaccaatattagtttattccatgatgattacaatatctcacactcacattctatcaaaaacaaatattaattaaaaaatttataataactgatgcatctttctcaaatcaaatgaattatatcctttaatacatttttgtaactttaagtgcacatcatttcactcgtgagatgatatcgatttgggaacaactgatttggtctggcctttgacctatcgacctcttcccttcattggcatgcacgtcggccttgtatgggccaaatgtcgatattacatatgcaaccttgtatggatcttatccttatcacattcttattatgttatcactgactttaagtgttagggtccttacaagtagccaccaccagaaatcttatcgcctccttactgcaatcttcctcaattccatgcacatgcttgcaagaaatagcctgagtcgtatctgtgttttcttctggttcatgaagcgaacaaattctatgaagcaccgacacggacaccggacacgacacggacacggacacgtgaacacctataatgtccaaaatataaaacgtagtatgggtgtcgtgtcggtgtcggacactgacacatacgcgtgtcagacaccggacacggcaagggaatggagtgtccatgcttcatagaacaaattaactctgtgatttatcaattgaatcgtgattttgtaacttttattattaaacttttaagtgtatattgcatactcatatacggagtgttgttgcaaatgcagtggttaacactagattaactcagttgatattcatttaccatttgcacatgggaagctttatatcccaatgttacgttgtaccagcttttggcatttctgatgccttcttctatatatatatatatataaaatttttaattgctgataaaaaaaatttgccaacccggatcaatataaatcaataaaattaatgatgaacgtaagaagtttgtataacagcaggttctgaatgcttttatctaatggaacattcaaattgacttatttgtatcatcatcatttaactcttgctcctacgaaat

SEQ ID NO: 15467 - DNA, 1072 bp, Glycine max
  Gm_smallRNAprecursor_8300
ccaaatatcaaccaatattagtttattccatgatgattacaatatctcacactcacattctatcaaaaacaaatattaattaaaaaatttataataactgatgcatctttctcaaatcaaatgaattatatcctttaatacatttttgtaactttaagtgcacatcatttcactcgtgagatgatatcgatttgggaacaactgatttggtctggcctttgacctatcgacctcttcccttcattggcatgcacgtcggccttgtatgggccaaatgtcgatattacatatgcaaccttgtatggatcttatccttatcacattcttattatgttatcactgactttaagtgttagggtccttacaagtagccaccaccagaaatcttatcgcctccttactgcaatcttcctcaattccatgcacatgcttgcaagaaatagcctgagtcgtatctgtgttttcttctggttcatgaagcgaacaaattctatgaagcaccgacacggacaccggacacgacacggacacggacacgtgaacacctataatgtccaaaatataaaacgtagtatgggtgtcgtgtcggtgtcggacactgacacatacgcgtgtcagacaccggacacggcaagggaatggagtgtccatgcttcatagaacaaattaactctgtgatttatcaattgaatcgtgattttgtaacttttattattaaacttttaagtgtatattgcatactcatatacggagtgttgttgcaaatgcagtggttaacactagattaactcagttgatattcatttaccatttgcacatgggaagctttatatcccaatgttacgttgtaccagcttttggcatttctgatgccttcttctatatatatatatatataaaatttttaattgctgataaaaaaaatttgccaacccggatcaatataaatcaataaaattaatgatgaacgtaagaagtttgtataacagcaggttctgaatgcttttatctaatggaacattcaaattgacttatttgtatcatcatcatttaactcttgctcctacgaaat

SEQ ID NO: 15468 - DNA, 1072 bp, Glycine max; identical to SEQ ID NO: 15467
  Gm_smallRNAprecursor_8301

SEQ ID NO: 15469 - DNA, 1077 bp, Glycine max
  Gm_smallRNAprecursor_8302
ccaaatatcaaccaatattagtttattccatgatgattacaatatctcacactcacattctatcaaaaacaaatattaattaaaaaatttataataactgatgcatctttctcaaatcaaatgaattatatcctttaatacatttttgtaactttaagtgcacatcatttcactcgtgagatgatatcgatttgggaacaactgatttggtctggcctttgacctatcgacctcttcccttcattggcatgcacgtcggccttgtatgggccaaatgtcgatattacatatgcaaccttgtatggatcttatccttatcacattcttattatgttatcactgactttaagtgttagggtccttacaagtagccaccaccagaaatcttatcgcctccttactgcaatcttcctcaattccatgcacatgcttgcaagaaatagcctgagtcgtatctgtgttttcttctggttcatgaagcgaacaaattctatgaagcaccgacacggacaccggacacgacacggacacggacacgtgaacacctataatgtccaaaatataaaacgtagtatgggtgtcgtgtcggtgtcggacactgacacatacgcgtgtcagacaccggacacggcaagggaatggagtgtccatgcttcatagaacaaattaactctgtgatttatcaattgaatcgtgattttgtaacttttattattaaacttttaagtgtatattgcatactcatatacggagtgttgttgcaaatgcagtggttaacactagattaactcagttgatattcatttaccatttgcacatgggaagctttatatcccaatgttacgttgtaccagcttttggcatttctgatgccttcttctatatatatatatatataaaatttttaattgctgataaaaaaaatttgccaacccggatcaatataaatcaataaaattaatgatgaacgtaagaagtttgtataacagcaggttctgaatgcttttatctaatggaacattcaaattgacttatttgtatcatcatcatttaactcttgctcctacgaaattgatc

SEQ ID NO: 15470 - DNA, 1077 bp, Glycine max; identical to SEQ ID NO: 15469
  Gm_smallRNAprecursor_8303

SEQ ID NO: 15471 - DNA, 1078 bp, Glycine max
  Gm_smallRNAprecursor_8304
ccaaatatcaaccaatattagtttattccatgatgattacaatatctcacactcacattctatcaaaaacaaatattaattaaaaaatttataataactgatgcatctttctcaaatcaaatgaattatatcctttaatacatttttgtaactttaagtgcacatcatttcactcgtgagatgatatcgatttgggaacaactgatttggtctggcctttgacctatcgacctcttcccttcattggcatgcacgtcggccttgtatgggccaaatgtcgatattacatatgcaaccttgtatggatcttatccttatcacattcttattatgttatcactgactttaagtgttagggtccttacaagtagccaccaccagaaatcttatcgcctccttactgcaatcttcctcaattccatgcacatgcttgcaagaaatagcctgagtcgtatctgtgttttcttctggttcatgaagcgaacaaattctatgaagcaccgacacggacaccggacacgacacggacacggacacgtgaacacctataatgtccaaaatataaaacgtagtatgggtgtcgtgtcggtgtcggacactgacacatacgcgtgtcagacaccggacacggcaagggaatggagtgtccatgcttcatagaacaaattaactctgtgatttatcaattgaatcgtgattttgtaacttttattattaaacttttaagtgtatattgcatactcatatacggagtgttgttgcaaatgcagtggttaacactagattaactcagttgatattcatttaccatttgcacatgggaagctttatatcccaatgttacgttgtaccagcttttggcatttctgatgccttcttctatatatatatatatataaaatttttaattgctgataaaaaaaatttgccaacccggatcaatataaatcaataaaattaatgatgaacgtaagaagtttgtataacagcaggttctgaatgcttttatctaatggaacattcaaattgacttatttgtatcatcatcatttaactcttgctcctacgaaattgatca

SEQ ID NO: 15472 - DNA, 1078 bp, Glycine max; identical to SEQ ID NO: 15471
  Gm_smallRNAprecursor_8305

SEQ ID NO: 15473 - DNA, 1079 bp, Glycine max
  Gm_smallRNAprecursor_8306
ccaaatatcaaccaatattagtttattccatgatgattacaatatctcacactcacattctatcaaaaacaaatattaattaaaaaatttataataactgatgcatctttctcaaatcaaatgaattatatcctttaatacatttttgtaactttaagtgcacatcatttcactcgtgagatgatatcgatttgggaacaactgatttggtctggcctttgacctatcgacctcttcccttcattggcatgcacgtcggccttgtatgggccaaatgtcgatattacatatgcaaccttgtatggatcttatccttatcacattcttattatgttatcactgactttaagtgttagggtccttacaagtagccaccaccagaaatcttatcgcctccttactgcaatcttcctcaattccatgcacatgcttgcaagaaatagcctgagtcgtatctgtgttttcttctggttcatgaagcgaacaaattctatgaagcaccgacacggacaccggacacgacacggacacggacacgtgaacacctataatgtccaaaatataaaacgtagtatgggtgtcgtgtcggtgtcggacactgacacatacgcgtgtcagacaccggacacggcaagggaatggagtgtccatgcttcatagaacaaattaactctgtgatttatcaattgaatcgtgattttgtaacttttattattaaacttttaagtgtatattgcatactcatatacggagtgttgttgcaaatgcagtggttaacactagattaactcagttgatattcatttaccatttgcacatgggaagctttatatcccaatgttacgttgtaccagcttttggcatttctgatgccttcttctatatatatatatatataaaatttttaattgctgataaaaaaaatttgccaacccggatcaatataaatcaataaaattaatgatgaacgtaagaagtttgtataacagcaggttctgaatgcttttatctaatggaacattcaaattgacttatttgtatcatcatcatttaactcttgctcctacgaaattgatcaa

SEQ ID NO: 15474 - DNA, 1079 bp, Glycine max; identical to SEQ ID NO: 15473
  Gm_smallRNAprecursor_8307

SEQ ID NO: 15475 - DNA, 1080 bp, Glycine max
  Gm_smallRNAprecursor_8308
ccaaatatcaaccaatattagtttattccatgatgattacaatatctcacactcacattctatcaaaaacaaatattaattaaaaaatttataataactgatgcatctttctcaaatcaaatgaattatatcctttaatacatttttgtaactttaagtgcacatcatttcactcgtgagatgatatcgatttgggaacaactgatttggtctggcctttgacctatcgacctcttcccttcattggcatgcacgtcggccttgtatgggccaaatgtcgatattacatatgcaaccttgtatggatcttatccttatcacattcttattatgttatcactgactttaagtgttagggtccttacaagtagccaccaccagaaatcttatcgcctccttactgcaatcttcctcaattccatgcacatgcttgcaagaaatagcctgagtcgtatctgtgttttcttctggttcatgaagcgaacaaattctatgaagcaccgacacggacaccggacacgacacggacacggacacgtgaacacctataatgtccaaaatataaaacgtagtatgggtgtcgtgtcggtgtcggacactgacacatacgcgtgtcagacaccggacacggcaagggaatggagtgtccatgcttcatagaacaaattaactctgtgatttatcaattgaatcgtgattttgtaacttttattattaaacttttaagtgtatattgcatactcatatacggagtgttgttgcaaatgcagtggttaacactagattaactcagttgatattcatttaccatttgcacatgggaagctttatatcccaatgttacgttgtaccagcttttggcatttctgatgccttcttctatatatatatatatataaaatttttaattgctgataaaaaaaatttgccaacccggatcaatataaatcaataaaattaatgatgaacgtaagaagtttgtataacagcaggttctgaatgcttttatctaatggaacattcaaattgacttatttgtatcatcatcatttaactcttgctcctacgaaattgatcaat

SEQ ID NO: 15476 - DNA, 1080 bp, Glycine max; identical to SEQ ID NO: 15475
  Gm_smallRNAprecursor_8309

SEQ ID NO: 15477 - DNA, 1076 bp, Glycine max
  Gm_smallRNAprecursor_8310
caaatatcaaccaatattagtttattccatgatgattacaatatctcacactcacattctatcaaaaacaaatattaattaaaaaatttataataactgatgcatctttctcaaatcaaatgaattatatcctttaatacatttttgtaactttaagtgcacatcatttcactcgtgagatgatatcgatttgggaacaactgatttggtctggcctttgacctatcgacctcttcccttcattggcatgcacgtcggccttgtatgggccaaatgtcgatattacatatgcaaccttgtatggatcttatccttatcacattcttattatgttatcactgactttaagtgttagggtccttacaagtagccaccaccagaaatcttatcgcctccttactgcaatcttcctcaattccatgcacatgcttgcaagaaatagcctgagtcgtatctgtgttttcttctggttcatgaagcgaacaaattctatgaagcaccgacacggacaccggacacgacacggacacggacacgtgaacacctataatgtccaaaatataaaacgtagtatgggtgtcgtgtcggtgtcggacactgacacatacgcgtgtcagacaccggacacggcaagggaatggagtgtccatgcttcatagaacaaattaactctgtgatttatcaattgaatcgtgattttgtaacttttattattaaacttttaagtgtatattgcatactcatatacggagtgttgttgcaaatgcagtggttaacactagattaactcagttgatattcatttaccatttgcacatgggaagctttatatcccaatgttacgttgtaccagcttttggcatttctgatgccttcttctatatatatatatatataaaatttttaattgctgataaaaaaaatttgccaacccggatcaatataaatcaataaaattaatgatgaacgtaagaagtttgtataacagcaggttctgaatgcttttatctaatggaacattcaaattgacttatttgtatcatcatcatttaactcttgctcctacgaaattgatc

SEQ ID NO: 15478 - DNA, 1076 bp, Glycine max; identical to SEQ ID NO: 15477
  Gm_smallRNAprecursor_8311

SEQ ID NO: 15479 - DNA, 1076 bp, Glycine max; identical to SEQ ID NO: 15477
  Gm_smallRNAprecursor_8312

SEQ ID NO: 15480 - DNA, 1076 bp, Glycine max; identical to SEQ ID NO: 15477
  Gm_smallRNAprecursor_8313

SEQ ID NO: 15481 - DNA, 1077 bp, Glycine max
  Gm_smallRNAprecursor_8314
caaatatcaaccaatattagtttattccatgatgattacaatatctcacactcacattctatcaaaaacaaatattaattaaaaaatttataataactgatgcatctttctcaaatcaaatgaattatatcctttaatacatttttgtaactttaagtgcacatcatttcactcgtgagatgatatcgatttgggaacaactgatttggtctggcctttgacctatcgacctcttcccttcattggcatgcacgtcggccttgtatgggccaaatgtcgatattacatatgcaaccttgtatggatcttatccttatcacattcttattatgttatcactgactttaagtgttagggtccttacaagtagccaccaccagaaatcttatcgcctccttactgcaatcttcctcaattccatgcacatgcttgcaagaaatagcctgagtcgtatctgtgttttcttctggttcatgaagcgaacaaattctatgaagcaccgacacggacaccggacacgacacggacacggacacgtgaacacctataatgtccaaaatataaaacgtagtatgggtgtcgtgtcggtgtcggacactgacacatacgcgtgtcagacaccggacacggcaagggaatggagtgtccatgcttcatagaacaaattaactctgtgatttatcaattgaatcgtgattttgtaacttttattattaaacttttaagtgtatattgcatactcatatacggagtgttgttgcaaatgcagtggttaacactagattaactcagttgatattcatttaccatttgcacatgggaagctttatatcccaatgttacgttgtaccagcttttggcatttctgatgccttcttctatatatatatatatataaaatttttaattgctgataaaaaaaatttgccaacccggatcaatataaatcaataaaattaatgatgaacgtaagaagtttgtataacagcaggttctgaatgcttttatctaatggaacattcaaattgacttatttgtatcatcatcatttaactcttgctcctacgaaattgatca

SEQ ID NO: 15482 - DNA, 1077 bp, Glycine max; identical to SEQ ID NO: 15481
  Gm_smallRNAprecursor_8315

SEQ ID NO: 15483 - DNA, 1078 bp, Glycine max
  Gm_smallRNAprecursor_8316
caaatatcaaccaatattagtttattccatgatgattacaatatctcacactcacattctatcaaaaacaaatattaattaaaaaatttataataactgatgcatctttctcaaatcaaatgaattatatcctttaatacatttttgtaactttaagtgcacatcatttcactcgtgagatgatatcgatttgggaacaactgatttggtctggcctttgacctatcgacctcttcccttcattggcatgcacgtcggccttgtatgggccaaatgtcgatattacatatgcaaccttgtatggatcttatccttatcacattcttattatgttatcactgactttaagtgttagggtccttacaagtagccaccaccagaaatcttatcgcctccttactgcaatcttcctcaattccatgcacatgcttgcaagaaatagcctgagtcgtatctgtgttttcttctggttcatgaagcgaacaaattctatgaagcaccgacacggacaccggacacgacacggacacggacacgtgaacacctataatgtccaaaatataaaacgtagtatgggtgtcgtgtcggtgtcggacactgacacatacgcgtgtcagacaccggacacggcaagggaatggagtgtccatgcttcatagaacaaattaactctgtgatttatcaattgaatcgtgattttgtaacttttattattaaacttttaagtgtatattgcatactcatatacggagtgttgttgcaaatgcagtggttaacactagattaactcagttgatattcatttaccatttgcacatgggaagctttatatcccaatgttacgttgtaccagcttttggcatttctgatgccttcttctatatatatatatatataaaatttttaattgctgataaaaaaaatttgccaacccggatcaatataaatcaataaaattaatgatgaacgtaagaagtttgtataacagcaggttctgaatgcttttatctaatggaacattcaaattgacttatttgtatcatcatcatttaactcttgctcctacgaaattgatcaa

SEQ ID NO: 15484 - DNA, 1061 bp, Glycine max
  Gm_smallRNAprecursor_8317
ccaatattagtttattccatgatgattacaatatctcacactcacattctatcaaaaacaaatattaattaaaaaatttataataactgatgcatctttctcaaatcaaatgaattatatcctttaatacatttttgtaactttaagtgcacatcatttcactcgtgagatgatatcgatttgggaacaactgatttggtctggcctttgacctatcgacctcttcccttcattggcatgcacgtcggccttgtatgggccaaatgtcgatattacatatgcaaccttgtatggatcttatccttatcacattcttattatgttatcactgactttaagtgttagggtccttacaagtagccaccaccagaaatcttatcgcctccttactgcaatcttcctcaattccatgcacatgcttgcaagaaatagcctgagtcgtatctgtgttttcttctggttcatgaagcgaacaaattctatgaagcaccgacacggacaccggacacgacacggacacggacacgtgaacacctataatgtccaaaatataaaacgtagtatgggtgtcgtgtcggtgtcggacactgacacatacgcgtgtcagacaccggacacggcaagggaatggagtgtccatgcttcatagaacaaattaactctgtgatttatcaattgaatcgtgattttgtaacttttattattaaacttttaagtgtatattgcatactcatatacggagtgttgttgcaaatgcagtggttaacactagattaactcagttgatattcatttaccatttgcacatgggaagctttatatcccaatgttacgttgtaccagcttttggcatttctgatgccttcttctatatatatatatatataaaatttttaattgctgataaaaaaaatttgccaacccggatcaatataaatcaataaaattaatgatgaacgtaagaagtttgtataacagcaggttctgaatgcttttatctaatggaacattcaaattgacttatttgtatcatcatcatttaactcttgctcctacgaaat

SEQ ID NO: 15485 - DNA, 1036 bp, Glycine max
  Gm_smallRNAprecursor_8318
attaaaaaatttataataactgatgcatctttctcaaatcaaatgaattatatcctttaatacatttttgtaactttaagtgcacatcatttcactcgtgagatgatatcgatttgggaacaactgatttggtctggcctttgacctatcgacctcttcccttcattggcatgcacgtcggccttgtatgggccaaatgtcgatattacatatgcaaccttgtatggatcttatccttatcacattcttattatgttatcactgactttaagtgttagggtccttacaagtagccaccaccagaaatcttatcgcctccttactgcaatcttcctcaattccatgcacatgcttgcaagaaatagcctgagtcgtatctgtgttttcttctggttcatgaagcgaacaaattctatgaagcaccgacacggacaccggacacgacacggacacggacacgtgaacacctataatgtccaaaatataaaacgtagtatgggtgtcgtgtcggtgtcggacactgacacatacgcgtgtcagacaccggacacggcaagggaatggagtgtccatgcttcatagaacaaattaactctgtgatttatcaattgaatcgtgattttgtaacttttattattaaacttttaagtgtatattgcatactcatatacggagtgttgttgcaaatgcagtggttaacactagattaactcagttgatattcatttaccatttgcacatgggaagctttatatcccaatgttacgttgtaccagcttttggcatttctgatgccttcttctatatatatatatatataaaatttttaattgctgataaaaaaaatttgccaacccggatcaatataaatcaataaaattaatgatgaacgtaagaagtttgtataacagcaggttctgaatgcttttatctaatggaacattcaaattgacttatttgtatcatcatcatttaactcttgctcctacgaaattgatcaatgaataatggatctgcaagcaacattacaccaaac

SEQ ID NO: 15486 - DNA, 1034 bp, Glycine max
  Gm_smallRNAprecursor_8319
ttaaaaaatttataataactgatgcatctttctcaaatcaaatgaattatatcctttaatacatttttgtaactttaagtgcacatcatttcactcgtgagatgatatcgatttgggaacaactgatttggtctggcctttgacctatcgacctcttcccttcattggcatgcacgtcggccttgtatgggccaaatgtcgatattacatatgcaaccttgtatggatcttatccttatcacattcttattatgttatcactgactttaagtgttagggtccttacaagtagccaccaccagaaatcttatcgcctccttactgcaatcttcctcaattccatgcacatgcttgcaagaaatagcctgagtcgtatctgtgttttcttctggttcatgaagcgaacaaattctatgaagcaccgacacggacaccggacacgacacggacacggacacgtgaacacctataatgtccaaaatataaaacgtagtatgggtgtcgtgtcggtgtcggacactgacacatacgcgtgtcagacaccggacacggcaagggaatggagtgtccatgcttcatagaacaaattaactctgtgatttatcaattgaatcgtgattttgtaacttttattattaaacttttaagtgtatattgcatactcatatacggagtgttgttgcaaatgcagtggttaacactagattaactcagttgatattcatttaccatttgcacatgggaagctttatatcccaatgttacgttgtaccagcttttggcatttctgatgccttcttctatatatatatatatataaaatttttaattgctgataaaaaaaatttgccaacccggatcaatataaatcaataaaattaatgatgaacgtaagaagtttgtataacagcaggttctgaatgcttttatctaatggaacattcaaattgacttatttgtatcatcatcatttaactcttgctcctacgaaattgatcaatgaataatggatctgcaagcaacattacaccaaa

SEQ ID NO: 15487 - DNA, 1035 bp, Glycine max
  Gm_smallRNAprecursor_8320
ttaaaaaatttataataactgatgcatctttctcaaatcaaatgaattatatcctttaatacatttttgtaactttaagtgcacatcatttcactcgtgagatgatatcgatttgggaacaactgatttggtctggcctttgacctatcgacctcttcccttcattggcatgcacgtcggccttgtatgggccaaatgtcgatattacatatgcaaccttgtatggatcttatccttatcacattcttattatgttatcactgactttaagtgttagggtccttacaagtagccaccaccagaaatcttatcgcctccttactgcaatcttcctcaattccatgcacatgcttgcaagaaatagcctgagtcgtatctgtgttttcttctggttcatgaagcgaacaaattctatgaagcaccgacacggacaccggacacgacacggacacggacacgtgaacacctataatgtccaaaatataaaacgtagtatgggtgtcgtgtcggtgtcggacactgacacatacgcgtgtcagacaccggacacggcaagggaatggagtgtccatgcttcatagaacaaattaactctgtgatttatcaattgaatcgtgattttgtaacttttattattaaacttttaagtgtatattgcatactcatatacggagtgttgttgcaaatgcagtggttaacactagattaactcagttgatattcatttaccatttgcacatgggaagctttatatcccaatgttacgttgtaccagcttttggcatttctgatgccttcttctatatatatatatatataaaatttttaattgctgataaaaaaaatttgccaacccggatcaatataaatcaataaaattaatgatgaacgtaagaagtttgtataacagcaggttctgaatgcttttatctaatggaacattcaaattgacttatttgtatcatcatcatttaactcttgctcctacgaaattgatcaatgaataatggatctgcaagcaacattacaccaaac

SEQ ID NO: 15488 - DNA, 1137 bp, Glycine max
  Gm_smallRNAprecursor_8321
ttaccgcgaagaaagttttgtgcaatgtggcacaggcaaaagagatgggatgtgtcctggacccataagttacttgggttgttgtaggcacttataattgaggggtgtcagtttgaaatgagagaaatgttaatttgcggagtaacatgtcttctcaaattctttagaaaagaacgccaagctaaaggtgtctccccttctacaatggcgtaggcaatcaggaagatatggttaactttatcttgtgcggtagctatcaacaatgtgtcagtatacttcccgtaaagtcatgtaccatttacttgtattatgggtttgcaatatgcaaagccattaatgcatgaaccaaatgaccaaaagacacgtttaaacaatgttttgcccgatactatttctcctccctcatacacagattccatttgagcagcgactacagtcccaggaacataagattgcaaagctcccaaaagttttggcagtttggcgtatgattcttcccagtttccatgaatcatctccaacgctttttgctttgctaaccatgtcttcttgtaggatggggtataattcatgaacgttttgatctctgcaatcaacttcttgatggagatggttgggtttgttttgacaattggttggatgatctatgctatgacatgtttgttgagttggtgataatcttgtttaagcattggcatgagacaagtatgatgacctctgatactcttgataatccatttgttatgcctctttgaattgcatgcgcccaagctccatgtacaaccattttcatgtaatttacacacgaagcttatccttttctggtcagagtaaattgttttgcaatcaaaatgatttttgatgttgtattctttgactgctcgaatacattgtgctttttaatcgaatgtcatgccaacctcgagttcaccgattggtggttgtacattatgttgctgatgaacaaaatggtgtcgatcaatgttgtgtggtaggtggtcaaagttcaagtctactggacacctagcttggtgatattgcaatgaaggtgacggaggtttcgttggtctgcaaacgccctcgccatcgctttggtcatcactttggtgattgatgtgatcaaagaaatgttgatcc

SEQ ID NO: 15489 - DNA, 1066 bp, Glycine max
  Gm_smallRNAprecursor_8322
cataagttacttgggttgttgtaggcacttataattgaggggtgtcagtttgaaatgagagaaatgttaatttgcggagtaacatgtcttctcaaattctttagaaaagaacgccaagctaaaggtgtctccccttctacaatggcgtaggcaatcaggaagatatggttaactttatcttgtgcggtagctatcaacaatgtgtcagtatacttcccgtaaagtcatgtaccatttacttgtattatgggtttgcaatatgcaaagccattaatgcatgaaccaaatgaccaaaagacacgtttaaacaatgttttgcccgatactatttctcctccctcatacacagattccatttgagcagcgactacagtcccaggaacataagattgcaaagctcccaaaagttttggcagtttggcgtatgattcttcccagtttccatgaatcatctccaacgctttttgctttgctaaccatgtcttcttgtaggatggggtataattcatgaacgttttgatctctgcaatcaacttcttgatggagatggttgggtttgttttgacaattggttggatgatctatgctatgacatgtttgttgagttggtgataatcttgtttaagcattggcatgagacaagtatgatgacctctgatactcttgataatccatttgttatgcctctttgaattgcatgcgcccaagctccatgtacaaccattttcatgtaatttacacacgaagcttatccttttctggtcagagtaaattgttttgcaatcaaaatgatttttgatgttgtattctttgactgctcgaatacattgtgctttttaatcgaatgtcatgccaacctcgagttcaccgattggtggttgtacattatgttgctgatgaacaaaatggtgtcgatcaatgttgtgtggtaggtggtcaaagttcaagtctactggacacctagcttggtgatattgcaatgaaggtgacggaggtttcgttggtctgcaaacgccctcgccatcgctttggtcatcactttggtgattgatgtgatcaaagaaat

SEQ ID NO: 15490 - DNA, 1106 bp, Glycine max
  Gm_smallRNAprecursor_8323
aaaaaaaaaaatgttacatagaaagagccgttccactttccggagttaaggttgatgaaacgtcggaggttgtcgatgctcatagcggcttcttcaacggttggggaggaagaggaggctctgattctgattctggtgagggaagaagaaaaggaagaagagaaagtaatagagtttggtttaagtgaaagaaagtgaatggtgttagtgttagtgttagtgttgagaagggaaggaacccaaactgaacactgaatagaagaagaagaagaagaagaagccattgttgtgttgagtctcttctcagaatctcaggtgccaccaaaattcagtttacgctaacgtatcttatctctctctcgagtaactctcatgtcttgttgggtgttgctaggtgcacccagcattattgttggtgcatccagcacttaaactgaaataacgaaaatactcttaattcgtaagtcatttaaattgacccgtaaaaagtttacggatcaacttgatccgtaagtcttttatggatcaacttgatccgtaagtcttttacggatcaagttgatccgtaaggcttctatggatcaagttgatctatattttccgtaaaaggcttacggatcaagttgatccgtaagccttttacgaatcaacttgatctgtatcaaccttatggatcaacttgatccgtacaatttacggaccaccctcacacacacccatcacaaaagcgaaaaaagcgcagagatagttttgatattttaaaaaaatgctgggtgcacctagcaactccctgtcttgtttgctaaatgcattggactggactggtttgaggatagtaggtatttttggagttacaatctacactccccttctttttaatacactcctcccccttttttcccaaaataccctttgcttaaataaaaactatgcactctctctttttgtttcaaacattaagtaaaaaatgataataaaaaaaatttgtctcaaacaataggacaacaatctaatgaggaccatttgaatcactttaaaaacataaaacactatattgaacttttttaagaaaaaaaataaggaaacaaattgaatataaccaaggt

SEQ ID NO: 15491 - DNA, 1107 bp, Glycine max
  Gm_smallRNAprecursor_8324
aaaaaaaaaaatgttacatagaaagagccgttccactttccggagttaaggttgatgaaacgtcggaggttgtcgatgctcatagcggcttcttcaacggttggggaggaagaggaggctctgattctgattctggtgagggaagaagaaaaggaagaagagaaagtaatagagtttggtttaagtgaaagaaagtgaatggtgttagtgttagtgttagtgttgagaagggaaggaacccaaactgaacactgaatagaagaagaagaagaagaagaagccattgttgtgttgagtctcttctcagaatctcaggtgccaccaaaattcagtttacgctaacgtatcttatctctctctcgagtaactctcatgtcttgttgggtgttgctaggtgcacccagcattattgttggtgcatccagcacttaaactgaaataacgaaaatactcttaattcgtaagtcatttaaattgacccgtaaaaagtttacggatcaacttgatccgtaagtcttttatggatcaacttgatccgtaagtcttttacggatcaagttgatccgtaaggcttctatggatcaagttgatctatattttccgtaaaaggcttacggatcaagttgatccgtaagccttttacgaatcaacttgatctgtatcaaccttatggatcaacttgatccgtacaatttacggaccaccctcacacacacccatcacaaaagcgaaaaaagcgcagagatagttttgatattttaaaaaaatgctgggtgcacctagcaactccctgtcttgtttgctaaatgcattggactggactggtttgaggatagtaggtatttttggagttacaatctacactccccttctttttaatacactcctcccccttttttcccaaaataccctttgcttaaataaaaactatgcactctctctttttgtttcaaacattaagtaaaaaatgataataaaaaaaatttgtctcaaacaataggacaacaatctaatgaggaccatttgaatcactttaaaaacataaaacactatattgaacttttttaagaaaaaaaataaggaaacaaattgaatataaccaaggta

SEQ ID NO: 15492 - DNA, 1078 bp, Glycine max
  Gm_smallRNAprecursor_8325
cgttccactttccggagttaaggttgatgaaacgtcggaggttgtcgatgctcatagcggcttcttcaacggttggggaggaagaggaggctctgattctgattctggtgagggaagaagaaaaggaagaagagaaagtaatagagtttggtttaagtgaaagaaagtgaatggtgttagtgttagtgttagtgttgagaagggaaggaacccaaactgaacactgaatagaagaagaagaagaagaagaagccattgttgtgttgagtctcttctcagaatctcaggtgccaccaaaattcagtttacgctaacgtatcttatctctctctcgagtaactctcatgtcttgttgggtgttgctaggtgcacccagcattattgttggtgcatccagcacttaaactgaaataacgaaaatactcttaattcgtaagtcatttaaattgacccgtaaaaagtttacggatcaacttgatccgtaagtcttttatggatcaacttgatccgtaagtcttttacggatcaagttgatccgtaaggcttctatggatcaagttgatctatattttccgtaaaaggcttacggatcaagttgatccgtaagccttttacgaatcaacttgatctgtatcaaccttatggatcaacttgatccgtacaatttacggaccaccctcacacacacccatcacaaaagcgaaaaaagcgcagagatagttttgatattttaaaaaaatgctgggtgcacctagcaactccctgtcttgtttgctaaatgcattggactggactggtttgaggatagtaggtatttttggagttacaatctacactccccttctttttaatacactcctcccccttttttcccaaaataccctttgcttaaataaaaactatgcactctctctttttgtttcaaacattaagtaaaaaatgataataaaaaaaatttgtctcaaacaataggacaacaatctaatgaggaccatttgaatcactttaaaaacataaaacactatattgaacttttttaagaaaaaaaataaggaaacaaattgaatataaccaaggt

SEQ ID NO: 15493 - DNA, 1079 bp, Glycine max
  Gm_smallRNAprecursor_8326
cgttccactttccggagttaaggttgatgaaacgtcggaggttgtcgatgctcatagcggcttcttcaacggttggggaggaagaggaggctctgattctgattctggtgagggaagaagaaaaggaagaagagaaagtaatagagtttggtttaagtgaaagaaagtgaatggtgttagtgttagtgttagtgttgagaagggaaggaacccaaactgaacactgaatagaagaagaagaagaagaagaagccattgttgtgttgagtctcttctcagaatctcaggtgccaccaaaattcagtttacgctaacgtatcttatctctctctcgagtaactctcatgtcttgttgggtgttgctaggtgcacccagcattattgttggtgcatccagcacttaaactgaaataacgaaaatactcttaattcgtaagtcatttaaattgacccgtaaaaagtttacggatcaacttgatccgtaagtcttttatggatcaacttgatccgtaagtcttttacggatcaagttgatccgtaaggcttctatggatcaagttgatctatattttccgtaaaaggcttacggatcaagttgatccgtaagccttttacgaatcaacttgatctgtatcaaccttatggatcaacttgatccgtacaatttacggaccaccctcacacacacccatcacaaaagcgaaaaaagcgcagagatagttttgatattttaaaaaaatgctgggtgcacctagcaactccctgtcttgtttgctaaatgcattggactggactggtttgaggatagtaggtatttttggagttacaatctacactccccttctttttaatacactcctcccccttttttcccaaaataccctttgcttaaataaaaactatgcactctctctttttgtttcaaacattaagtaaaaaatgataataaaaaaaatttgtctcaaacaataggacaacaatctaatgaggaccatttgaatcactttaaaaacataaaacactatattgaacttttttaagaaaaaaaataaggaaacaaattgaatataaccaaggta

SEQ ID NO: 15494 - DNA, 1140 bp, Glycine max
  Gm_smallRNAprecursor_8327
attttgatccaatcccacaaatctttccaaaagaagtccaacaaggatttcaacagttcaatagattgttcaacaaccaggaatcaagaattccagccgatctaatgtatttttccacctttgctttgtcatggatcttttcatggcaatacaggtatgggaaaactgaaaacaacaagcaatattcacctttgcagaaacatgcttttgtaaaatggtggacacaatttgatacctcaaaggttgctccagaccaagttatgaactggttccagagtcaccccgaatttctcaaacctactgatccagaaacatcattatttctgaatcagaaatctcagcttgcggcgttcttggtcagttcaaaattcaaagaaaaccttgcctagaaccttaagaaagttctccagctacttcaacaagaagaagaggaggaatcttcaaagaaggatgttgaatcttcagaagacattgatgaccaagatgatgatcctttctaccagaatgaggatgattgttttggcatctcattagaagatgattaattagttttggttgttgttaattaatttgtaattttggacaatactacctgtcctgtagcaaataagtcccgatcaaaactaattgttctgtaacaaacagtcaaatagttccggtcaaaactaccgacaattaccggtcaaagaattttggctataaggaatcctcaatcatattgtgaggcaccctttcatttggtcattttttttcaggtttctgagaagaggtgctctgaaagaacaacttttgtaaacgcttctttcaagtttcaataaatttctattttccatccctcttctctctttttaccgatcctgtgtggttctgtcgccgcttcgatttctttgtttatgaaaacctgaaatttgtaaaccggtctctgatgtgcctttgatatgtgtttttaaaagtttatattttgatttccgttttatcatattgcattcttactttctatttgtccatttggtcctacgccactgatctatggtgtgtgtgtgtatatatatatatatatatatatatatatatatatatatatacccctgttctgactgggacccctaaaatgtcaatacggccctagatctcaaacta

SEQ ID NO: 15495 - DNA, 1046 bp, Glycine max
  Gm_smallRNAprecursor_8328
atatatatatataggaagtaagaatgtactatgataaatggaaatgagagtataagcttgtaaaatagatatcaagggcacaccggagaccggtttacaaatcccaggttttcataaacaaagaaaccgaagaggcggcagagctgcacaggatcggtaaagagagagaagagggatgaaaaatatatatttattgaaacttgaaagaagcgcttacaaaaatcttgtttcagagaacctctcttcagaaacctcaaaaatggccaaatgaaagggtgccttacaacatacttgaggactccttatatagccaaaaatctaagactggtagttgccggtagttttgaccgggactatttgactatttgttacaagacgagtagttttgaccgggactttaatggctacaggacaggtagtattgtccagcattaattacacattaattacaaacagatggttttgtgatcgaaattaaatttaatctaaacagataccaaaacaatcatcttcgttttggtaaaaggggtcttcttcttcttcttcagcagaacttgtttcttccttctttgaggatgaaccttcttcttcctactgtaacatttgcagaacttcctttatatttttagttaggacctcctttgatttcgatcttgctaaaaatgttgccagatgagacttttggttcaaaaacacagaagtttctggatcagctgctttgaggaattctggatgggattggaaccagagttttacttgttctagatctactttggatgagtcaaattgtgtccaccattttacaaatacgtgtctttgtagtgatggatattgatttttcttttcagtcttgctgtaacgatactgccatgagaagatccatgacagtgcaaagcttgaaaagtatttaagatatgttggaattcgtgattcctgcgaattgtattatctctcaaattaagcaaatccttgttggactgtttatgggaatatctctggaattggtccaaagaagtcccaccattgcaaaaaccattggggaaatc

SEQ ID NO: 15496 - DNA, 1114 bp, Glycine max
  Gm_smallRNAprecursor_8329
ggactttaatggctacaggacaggtagtattgtccagcattaattacacattaattacaaacagatggttttgtgatcgaaattaaatttaatctaaacagataccaaaacaatcatcttcgttttggtaaaaggggtcttcttcttcttcttcagcagaacttgtttcttccttctttgaggatgaaccttcttcttcctactgtaacatttgcagaacttcctttatatttttagttaggacctcctttgatttcgatcttgctaaaaatgttgccagatgagacttttggttcaaaaacacagaagtttctggatcagctgctttgaggaattctggatgggattggaaccagagttttacttgttctagatctactttggatgagtcaaattgtgtccaccattttacaaatacgtgtctttgtagtgatggatattgatttttcttttcagtcttgctgtaacgatactgccatgagaagatccatgacagtgcaaagcttgaaaagtatttaagatatgttggaattcgtgattcctgcgaattgtattatctctcaaattaagcaaatccttgttggactgtttatgggaatatctctggaattggtccaaagaagtcccaccattgcaaaaaccattggggaaatcgtaaattgtattggtcttgaaatatattagccatgaatgcttgaagtgggtattttggtgccaaaacaccttagtccaagcattaacataatcccaataggtataacctacttgatcaaatggaactgaaaatctctttcctttgttcaagtccgaaccaaagtgtcttggttgaagaacttttagtatttggattgtggagtgggtgtttaatgtttggtcttttgggtctttgaaatgtttgatagatactgaatttgaatctaccaaaatcaattcataaaaagtccttgtcttcaggatggtggttggtttgtagtgaaatcctggtgggaaagccttggccgtcaccttgcagggatttttgtcccaaaattcaggttccatctgcaaaacagttacaaatttatttttataaatataattgttagtttgtttggtaggtggtatttgagctttg

SEQ ID NO: 15497 - DNA, 1129 bp, Glycine max
  Gm_smallRNAprecursor_8330
tgcaaaacagttacaaatttatttttataaatataattgttagtttgtttggtaggtggtatttgagctttggctaaaggtagtttccctttaggattggtagttgctttggtcattgatgcattttggatcattgtttgtaaatttgattcagattcatcatcagattctgaggcaatgtctgcccatgatttttttgattatttttggaaatttggttagacccatgtcttgaagggcctgaagggtttcaattggccatgcatagtcagccgatgtttgtttggtggctgccggtttgggagattcctgagtggatggctcaggtttgattgaggtaatttgggttaatgacccttctaaattggttttctgggtagatgacccaacctgggttggtgacccagaagaggttgatgatttcttaatggttggctctggaagagctagtctggctcctttgcctgtacttcttcctccccttagggagattcccgatgccttaggaggcattaccacttttctgtaagaattcatgggtaaggtagtcaggtaatgaatttgaggtgcccttgatgtattctatgtcaaaatcaaagacacttagaattgcttgccatcttgcaaaaatttgttttgaggcaaggtttttaacatctttttgtaaaatatctttggttgatttacaatcaactctgattaaaaaaatttggtttaataaatccgattgaaatttggaaatgcacaaaacaattgctaaaacttcctttttaacagttgaatattttaattgtccaggattccaatgttttgatgtatatgcaatgacatgatcttggccatggactctttgtttgaggatgccaccataacctatgtctgaagtgtcagtttcgacaattttaaatgcctgtagagtaggaagatacagacattttatggattggactttgactttgatttctttaactgtttgtgtatggaggtcagaccaaggaggcagatttttcttcaacctatcatgcaatggtttgacaatattctttaaatagaggacaaattctcctacataatttagacaacctagaaatctttgtaactgggttttgtctaagatttggttgggaaa

SEQ ID NO: 15498 - DNA, 1115 bp, Glycine max
  Gm_smallRNAprecursor_8331
aaatttatttttataaatataattgttagtttgtttggtaggtggtatttgagctttggctaaaggtagtttccctttaggattggtagttgctttggtcattgatgcattttggatcattgtttgtaaatttgattcagattcatcatcagattctgaggcaatgtctgcccatgatttttttgattatttttggaaatttggttagacccatgtcttgaagggcctgaagggtttcaattggccatgcatagtcagccgatgtttgtttggtggctgccggtttgggagattcctgagtggatggctcaggtttgattgaggtaatttgggttaatgacccttctaaattggttttctgggtagatgacccaacctgggttggtgacccagaagaggttgatgatttcttaatggttggctctggaagagctagtctggctcctttgcctgtacttcttcctccccttagggagattcccgatgccttaggaggcattaccacttttctgtaagaattcatgggtaaggtagtcaggtaatgaatttgaggtgcccttgatgtattctatgtcaaaatcaaagacacttagaattgcttgccatcttgcaaaaatttgttttgaggcaaggtttttaacatctttttgtaaaatatctttggttgatttacaatcaactctgattaaaaaaatttggtttaataaatccgattgaaatttggaaatgcacaaaacaattgctaaaacttcctttttaacagttgaatattttaattgtccaggattccaatgttttgatgtatatgcaatgacatgatcttggccatggactctttgtttgaggatgccaccataacctatgtctgaagtgtcagtttcgacaattttaaatgcctgtagagtaggaagatacagacattttatggattggactttgactttgatttctttaactgtttgtgtatggaggtcagaccaaggaggcagatttttcttcaacctatcatgcaatggtttgacaatattctttaaatagaggacaaattctcctacataatttagacaacctagaaatctttgtaactgggttttgtctaagatttggttgggaaa

SEQ ID NO: 15499 - DNA, 1071 bp, Glycine max
  Gm_smallRNAprecursor_8332
taaattggttttctgggtagatgacccaacctgggttggtgacccagaagaggttgatgatttcttaatggttggctctggaagagctagtctggctcctttgcctgtacttcttcctccccttagggagattcccgatgccttaggaggcattaccacttttctgtaagaattcatgggtaaggtagtcaggtaatgaatttgaggtgcccttgatgtattctatgtcaaaatcaaagacacttagaattgcttgccatcttgcaaaaatttgttttgaggcaaggtttttaacatctttttgtaaaatatctttggttgatttacaatcaactctgattaaaaaaatttggtttaataaatccgattgaaatttggaaatgcacaaaacaattgctaaaacttcctttttaacagttgaatattttaattgtccaggattccaatgttttgatgtatatgcaatgacatgatcttggccatggactctttgtttgaggatgccaccataacctatgtctgaagtgtcagtttcgacaattttaaatgcctgtagagtaggaagatacagacattttatggattggactttgactttgatttctttaactgtttgtgtatggaggtcagaccaaggaggcagatttttcttcaacctatcatgcaatggtttgacaatattctttaaatagaggacaaattctcctacataatttagacaacctagaaatctttgtaactgggttttgtctaagatttggttgggaaatttgctagcaaactctattaacctttctattggaatgattgtaccttgatatatattgtgaccaaggaatcgaattcgagtttggaaaagattgatttttgatttggagactgccaaaccattatgtttgatgatatggatgaaagtctggagatgtttgaaatgttggtcaatgttttgggaaaagattaaaacatcatctatgtagacaatgacaaattttgaatagggattaaaaatatcattcataattttttgaaattctgaaggggcattcttcagtccgaatgacatcacattcc

SEQ ID NO: 15500 - DNA, 1131 bp, Glycine max
  Gm_smallRNAprecursor_8333
gttggctctggaagagctagtctggctcctttgcctgtacttcttcctccccttagggagattcccgatgccttaggaggcattaccacttttctgtaagaattcatgggtaaggtagtcaggtaatgaatttgaggtgcccttgatgtattctatgtcaaaatcaaagacacttagaattgcttgccatcttgcaaaaatttgttttgaggcaaggtttttaacatctttttgtaaaatatctttggttgatttacaatcaactctgattaaaaaaatttggtttaataaatccgattgaaatttggaaatgcacaaaacaattgctaaaacttcctttttaacagttgaatattttaattgtccaggattccaatgttttgatgtatatgcaatgacatgatcttggccatggactctttgtttgaggatgccaccataacctatgtctgaagtgtcagtttcgacaattttaaatgcctgtagagtaggaagatacagacattttatggattggactttgactttgatttctttaactgtttgtgtatggaggtcagaccaaggaggcagatttttcttcaacctatcatgcaatggtttgacaatattctttaaatagaggacaaattctcctacataatttagacaacctagaaatctttgtaactgggttttgtctaagatttggttgggaaatttgctagcaaactctattaacctttctattggaatgattgtaccttgatatatattgtgaccaaggaatcgaattcgagtttggaaaagattgatttttgatttggagactgccaaaccattatgtttgatgatatggatgaaagtctggagatgtttgaaatgttggtcaatgttttgggaaaagattaaaacatcatctatgtagacaatgacaaattttgaatagggattaaaaatatcattcataattttttgaaattctgaaggggcattcttcagtccgaatgacatcacattccattcatattgcccaaaaggtacagtaaacgttgttttctacctatctgattcttggatttggatttgccaaaatccagatttcatatcaaattttgaaaatatctttgcaaaatttaatctgttaagcaa

SEQ ID NO: 15501 - DNA, 1132 bp, Glycine max
  Gm_smallRNAprecursor_8334
gttggctctggaagagctagtctggctcctttgcctgtacttcttcctccccttagggagattcccgatgccttaggaggcattaccacttttctgtaagaattcatgggtaaggtagtcaggtaatgaatttgaggtgcccttgatgtattctatgtcaaaatcaaagacacttagaattgcttgccatcttgcaaaaatttgttttgaggcaaggtttttaacatctttttgtaaaatatctttggttgatttacaatcaactctgattaaaaaaatttggtttaataaatccgattgaaatttggaaatgcacaaaacaattgctaaaacttcctttttaacagttgaatattttaattgtccaggattccaatgttttgatgtatatgcaatgacatgatcttggccatggactctttgtttgaggatgccaccataacctatgtctgaagtgtcagtttcgacaattttaaatgcctgtagagtaggaagatacagacattttatggattggactttgactttgatttctttaactgtttgtgtatggaggtcagaccaaggaggcagatttttcttcaacctatcatgcaatggtttgacaatattctttaaatagaggacaaattctcctacataatttagacaacctagaaatctttgtaactgggttttgtctaagatttggttgggaaatttgctagcaaactctattaacctttctattggaatgattgtaccttgatatatattgtgaccaaggaatcgaattcgagtttggaaaagattgatttttgatttggagactgccaaaccattatgtttgatgatatggatgaaagtctggagatgtttgaaatgttggtcaatgttttgggaaaagattaaaacatcatctatgtagacaatgacaaattttgaatagggattaaaaatatcattcataattttttgaaattctgaaggggcattcttcagtccgaatgacatcacattccattcatattgcccaaaaggtacagtaaacgttgttttctacctatctgattcttggatttggatttgccaaaatccagatttcatatcaaattttgaaaatatctttgcaaaatttaatctgttaagcaaa

SEQ ID NO: 15502 - DNA, 1049 bp, Glycine max
  Gm_smallRNAprecursor_8335
tttgaggtgcccttgatgtattctatgtcaaaatcaaagacacttagaattgcttgccatcttgcaaaaatttgttttgaggcaaggtttttaacatctttttgtaaaatatctttggttgatttacaatcaactctgattaaaaaaatttggtttaataaatccgattgaaatttggaaatgcacaaaacaattgctaaaacttcctttttaacagttgaatattttaattgtccaggattccaatgttttgatgtatatgcaatgacatgatcttggccatggactctttgtttgaggatgccaccataacctatgtctgaagtgtcagtttcgacaattttaaatgcctgtagagtaggaagatacagacattttatggattggactttgactttgatttctttaactgtttgtgtatggaggtcagaccaaggaggcagatttttcttcaacctatcatgcaatggtttgacaatattctttaaatagaggacaaattctcctacataatttagacaacctagaaatctttgtaactgggttttgtctaagatttggttgggaaatttgctagcaaactctattaacctttctattggaatgattgtaccttgatatatattgtgaccaaggaatcgaattcgagtttggaaaagattgatttttgatttggagactgccaaaccattatgtttgatgatatggatgaaagtctggagatgtttgaaatgttggtcaatgttttgggaaaagattaaaacatcatctatgtagacaatgacaaattttgaatagggattaaaaatatcattcataattttttgaaattctgaaggggcattcttcagtccgaatgacatcacattccattcatattgcccaaaaggtacagtaaacgttgttttctacctatctgattcttggatttggatttgccaaaatccagatttcatatcaaattttgaaaatatctttgcaaaatttaatctgttaagcaaatcttttttgtttggaataggatatctaatccattgtaatgcttgatt

SEQ ID NO: 15503 - DNA, 1049 bp, Glycine max; identical to SEQ ID NO: 15502
  Gm_smallRNAprecursor_8336

SEQ ID NO: 15504 - DNA, 1050 bp, Glycine max
  Gm_smallRNAprecursor_8337
tttgaggtgcccttgatgtattctatgtcaaaatcaaagacacttagaattgcttgccatcttgcaaaaatttgttttgaggcaaggtttttaacatctttttgtaaaatatctttggttgatttacaatcaactctgattaaaaaaatttggtttaataaatccgattgaaatttggaaatgcacaaaacaattgctaaaacttcctttttaacagttgaatattttaattgtccaggattccaatgttttgatgtatatgcaatgacatgatcttggccatggactctttgtttgaggatgccaccataacctatgtctgaagtgtcagtttcgacaattttaaatgcctgtagagtaggaagatacagacattttatggattggactttgactttgatttctttaactgtttgtgtatggaggtcagaccaaggaggcagatttttcttcaacctatcatgcaatggtttgacaatattctttaaatagaggacaaattctcctacataatttagacaacctagaaatctttgtaactgggttttgtctaagatttggttgggaaatttgctagcaaactctattaacctttctattggaatgattgtaccttgatatatattgtgaccaaggaatcgaattcgagtttggaaaagattgatttttgatttggagactgccaaaccattatgtttgatgatatggatgaaagtctggagatgtttgaaatgttggtcaatgttttgggaaaagattaaaacatcatctatgtagacaatgacaaattttgaatagggattaaaaatatcattcataattttttgaaattctgaaggggcattcttcagtccgaatgacatcacattccattcatattgcccaaaaggtacagtaaacgttgttttctacctatctgattcttggatttggatttgccaaaatccagatttcatatcaaattttgaaaatatctttgcaaaatttaatctgttaagcaaatcttttttgtttggaataggatatctaatccattgtaatgcttgattt

SEQ ID NO: 15505 - DNA, 1050 bp, Glycine max; identical to SEQ ID NO: 15504
  Gm_smallRNAprecursor_8338

SEQ ID NO: 15506 - DNA, 1047 bp, Glycine max
  Gm_smallRNAprecursor_8339
ttgaggtgcccttgatgtattctatgtcaaaatcaaagacacttagaattgcttgccatcttgcaaaaatttgttttgaggcaaggtttttaacatctttttgtaaaatatctttggttgatttacaatcaactctgattaaaaaaatttggtttaataaatccgattgaaatttggaaatgcacaaaacaattgctaaaacttcctttttaacagttgaatattttaattgtccaggattccaatgttttgatgtatatgcaatgacatgatcttggccatggactctttgtttgaggatgccaccataacctatgtctgaagtgtcagtttcgacaattttaaatgcctgtagagtaggaagatacagacattttatggattggactttgactttgatttctttaactgtttgtgtatggaggtcagaccaaggaggcagatttttcttcaacctatcatgcaatggtttgacaatattctttaaatagaggacaaattctcctacataatttagacaacctagaaatctttgtaactgggttttgtctaagatttggttgggaaatttgctagcaaactctattaacctttctattggaatgattgtaccttgatatatattgtgaccaaggaatcgaattcgagtttggaaaagattgatttttgatttggagactgccaaaccattatgtttgatgatatggatgaaagtctggagatgtttgaaatgttggtcaatgttttgggaaaagattaaaacatcatctatgtagacaatgacaaattttgaatagggattaaaaatatcattcataattttttgaaattctgaaggggcattcttcagtccgaatgacatcacattccattcatattgcccaaaaggtacagtaaacgttgttttctacctatctgattcttggatttggatttgccaaaatccagatttcatatcaaattttgaaaatatctttgcaaaatttaatctgttaagcaaatcttttttgtttggaataggatatctaatccattgtaatgcttgat

SEQ ID NO: 15507 - DNA, 1048 bp, Glycine max
  Gm_smallRNAprecursor_8340
ttgaggtgcccttgatgtattctatgtcaaaatcaaagacacttagaattgcttgccatcttgcaaaaatttgttttgaggcaaggtttttaacatctttttgtaaaatatctttggttgatttacaatcaactctgattaaaaaaatttggtttaataaatccgattgaaatttggaaatgcacaaaacaattgctaaaacttcctttttaacagttgaatattttaattgtccaggattccaatgttttgatgtatatgcaatgacatgatcttggccatggactctttgtttgaggatgccaccataacctatgtctgaagtgtcagtttcgacaattttaaatgcctgtagagtaggaagatacagacattttatggattggactttgactttgatttctttaactgtttgtgtatggaggtcagaccaaggaggcagatttttcttcaacctatcatgcaatggtttgacaatattctttaaatagaggacaaattctcctacataatttagacaacctagaaatctttgtaactgggttttgtctaagatttggttgggaaatttgctagcaaactctattaacctttctattggaatgattgtaccttgatatatattgtgaccaaggaatcgaattcgagtttggaaaagattgatttttgatttggagactgccaaaccattatgtttgatgatatggatgaaagtctggagatgtttgaaatgttggtcaatgttttgggaaaagattaaaacatcatctatgtagacaatgacaaattttgaatagggattaaaaatatcattcataattttttgaaattctgaaggggcattcttcagtccgaatgacatcacattccattcatattgcccaaaaggtacagtaaacgttgttttctacctatctgattcttggatttggatttgccaaaatccagatttcatatcaaattttgaaaatatctttgcaaaatttaatctgttaagcaaatcttttttgtttggaataggatatctaatccattgtaatgcttgatt

SEQ ID NO: 15508 - DNA, 1049 bp, Glycine max
  Gm_smallRNAprecursor_8341
ttgaggtgcccttgatgtattctatgtcaaaatcaaagacacttagaattgcttgccatcttgcaaaaatttgttttgaggcaaggtttttaacatctttttgtaaaatatctttggttgatttacaatcaactctgattaaaaaaatttggtttaataaatccgattgaaatttggaaatgcacaaaacaattgctaaaacttcctttttaacagttgaatattttaattgtccaggattccaatgttttgatgtatatgcaatgacatgatcttggccatggactctttgtttgaggatgccaccataacctatgtctgaagtgtcagtttcgacaattttaaatgcctgtagagtaggaagatacagacattttatggattggactttgactttgatttctttaactgtttgtgtatggaggtcagaccaaggaggcagatttttcttcaacctatcatgcaatggtttgacaatattctttaaatagaggacaaattctcctacataatttagacaacctagaaatctttgtaactgggttttgtctaagatttggttgggaaatttgctagcaaactctattaacctttctattggaatgattgtaccttgatatatattgtgaccaaggaatcgaattcgagtttggaaaagattgatttttgatttggagactgccaaaccattatgtttgatgatatggatgaaagtctggagatgtttgaaatgttggtcaatgttttgggaaaagattaaaacatcatctatgtagacaatgacaaattttgaatagggattaaaaatatcattcataattttttgaaattctgaaggggcattcttcagtccgaatgacatcacattccattcatattgcccaaaaggtacagtaaacgttgttttctacctatctgattcttggatttggatttgccaaaatccagatttcatatcaaattttgaaaatatctttgcaaaatttaatctgttaagcaaatcttttttgtttggaataggatatctaatccattgtaatgcttgattt

SEQ ID NO: 15509 - DNA, 1232 bp, Glycine max
  Gm_smallRNAprecursor_8342
aattgcttgccatcttgcaaaaatttgttttgaggcaaggtttttaacatctttttgtaaaatatctttggttgatttacaatcaactctgattaaaaaaatttggtttaataaatccgattgaaatttggaaatgcacaaaacaattgctaaaacttcctttttaacagttgaatattttaattgtccaggattccaatgttttgatgtatatgcaatgacatgatcttggccatggactctttgtttgaggatgccaccataacctatgtctgaagtgtcagtttcgacaattttaaatgcctgtagagtaggaagatacagacattttatggattggactttgactttgatttctttaactgtttgtgtatggaggtcagaccaaggaggcagatttttcttcaacctatcatgcaatggtttgacaatattctttaaatagaggacaaattctcctacataatttagacaacctagaaatctttgtaactgggttttgtctaagatttggttgggaaatttgctagcaaactctattaacctttctattggaatgattgtaccttgatatatattgtgaccaaggaatcgaattcgagtttggaaaagattgatttttgatttggagactgccaaaccattatgtttgatgatatggatgaaagtctggagatgtttgaaatgttggtcaatgttttgggaaaagattaaaacatcatctatgtagacaatgacaaattttgaatagggattaaaaatatcattcataattttttgaaattctgaaggggcattcttcagtccgaatgacatcacattccattcatattgcccaaaaggtacagtaaacgttgttttctacctatctgattcttggatttggatttgccaaaatccagatttcatatcaaattttgaaaatatctttgcaaaatttaatctgttaagcaaatcttttttgtttggaataggatatctaatccattgtaatgcttgatttagtggtttgtaatttatgactaagcggggtgttccacgctcaatctcaaattgtttgttgacataaaaagccgcacaagaccatgggcttttgcttttccggattaggcctttatcaagcaaatccttgatttccttttggcagtattgaaggagttcttcgttcatttggattggtctggcttttgtgggaatttgtttttccctaaagtttttctcataagggagat

SEQ ID NO: 15510 - DNA, 1102 bp, Glycine max
  Gm_smallRNAprecursor_8343
tggatgaaagtctggagatgtttgaaatgttggtcaatgttttgggaaaagattaaaacatcatctatgtagacaatgacaaattttgaatagggattaaaaatatcattcataattttttgaaattctgaaggggcattcttcagtccgaatgacatcacattccattcatattgcccaaaaggtacagtaaacgttgttttctacctatctgattcttggatttggatttgccaaaatccagatttcatatcaaattttgaaaatatctttgcaaaatttaatctgttaagcaaatcttttttgtttggaataggatatctaatccattgtaatgcttgatttagtggtttgtaatttatgactaagcggggtgttccacgctcaatctcaaattgtttgttgacataaaaagccgcacaagaccatgggcttttgcttttccggattaggcctttatcaagcaaatccttgatttccttttggcagtattgaaggagttcttcgttcatttggattggtctggcttttgtgggaatttgtttttccctaaagtttttctcataagggagatcaacaatatgtttctttctatcccaaaatgcatgtggcaaatcagaacagacagttgattcaatatgatttaataaagattgaatttttttcttttacttggggttttcccagttgtatctgaatattattaagagatacttcttcttttaagaagttaatttgattaatcttattttctataagatttatatttctggagattggtttagtagaaaaattaaatataatttttcttcctaagtaatttgtggttattcctttattagatatttgaataagaaacaaagctcgaatgaagggggttcctaggattactttgttcttaaggttttttactataagaaagtttgtgttaatcctaagaccttggttctcaatgattgcatttgatagcttaaaattaattgttaattttgagctgtttgtcgtacttaatttttctgaggttttctcaaagaattttgtaggaattaatccttctaaaatgcagtttgaatcagtccctgtgtcaaatagggccattgtt

SEQ ID NO: 15511 - DNA, 1199 bp, Glycine max
  Gm_smallRNAprecursor_8344
agtcttcaaatttattatgtctaatatctcttagacacattaaaactgctgcatctatacccatatcaattaagggcttgatggctacttgtacacaaccgatgtgtagatatttatacttacggctatgttcataaattgaattttttgaaagtaaatgaaattcttcccctatatcttgtcctagatgaatattgttttctactattttgattatgtaatcgaagttgtgtttgtccttaattgtttcaggaacgtataattgatcctgagggatttctggaatgttccagtcatccatgctttgattgatatctttgaatcggacttcctcatcgaatagattgtgtttgggggcgatctcttgggtctggttatcttgatcatttaataaattggagtttcttgaagaagatgatgaggaggaatttgatcgaaaagagatacgggaaaaagatcgcaatagtctagacatgattataactctaatatatttgccttcatttggttccatagaaatatttccataaggctatatgttacagaacttcttggatctgaataaatgaattttttttacggacaatatagtttgaacactactcctatagccactagtatattatgtctcaatattttatttgaacaatacaccttagtcttactgccctttctcaaccacggaacttactgctacaatatcattcaactaaaatatcaaactactatgcttccagaaaatactgttcaaacatatactgtttaaattaaaactactgtacatggttcagatccataagttcagttaacatatgccaagtcataaagataggaagtaagatcattacatatatatattgtgatttcattacatagacttaaatgtcataattatatacaaaacatcccaagtgataaagattatataacaatactcaaactatagaaattcccattgaattgtgcctttaacaacaataattcaatacataaagtctttcaaaaaaatagcctacaaatgattttaaataaccaaacaagaaatcttcacagatagccttcatccatagcacctactcaatctagaacatgaaaactaaaactgagacaaggtcttagtgagtgcataatgcatgcaattcacctataggttcaatatatacatcatttataaggagtcaaaccattcacatccttct

SEQ ID NO: 15512 - DNA, 1098 bp, Glycine max
  Gm_smallRNAprecursor_8345
tttctactattttgattatgtaatcgaagttgtgtttgtccttaattgtttcaggaacgtataattgatcctgagggatttctggaatgttccagtcatccatgctttgattgatatctttgaatcggacttcctcatcgaatagattgtgtttgggggcgatctcttgggtctggttatcttgatcatttaataaattggagtttcttgaagaagatgatgaggaggaatttgatcgaaaagagatacgggaaaaagatcgcaatagtctagacatgattataactctaatatatttgccttcatttggttccatagaaatatttccataaggctatatgttacagaacttcttggatctgaataaatgaattttttttacggacaatatagtttgaacactactcctatagccactagtatattatgtctcaatattttatttgaacaatacaccttagtcttactgccctttctcaaccacggaacttactgctacaatatcattcaactaaaatatcaaactactatgcttccagaaaatactgttcaaacatatactgtttaaattaaaactactgtacatggttcagatccataagttcagttaacatatgccaagtcataaagataggaagtaagatcattacatatatatattgtgatttcattacatagacttaaatgtcataattatatacaaaacatcccaagtgataaagattatataacaatactcaaactatagaaattcccattgaattgtgcctttaacaacaataattcaatacataaagtctttcaaaaaaatagcctacaaatgattttaaataaccaaacaagaaatcttcacagatagccttcatccatagcacctactcaatctagaacatgaaaactaaaactgagacaaggtcttagtgagtgcataatgcatgcaattcacctataggttcaatatatacatcatttataaggagtcaaaccattcacatccttctttacatgaatcacaatcattatacatcattgataaaaaaaattcatatttgaaccattcatcattccttgcacataaaaatgaaattcttattttat

SEQ ID NO: 15513 - DNA, 1185 bp, Glycine max
  Gm_smallRNAprecursor_8346
ctatattgatcgaccccattttgttcatcagcaacacaatgtacaaccatcagtcggtgtactcgaggttggcatgaccttcgatgacaaatcacaatgtattcgagcaatcaaagaatacaacatcagaaatcattttgattgcagaacaatttactctgaccaaagaaggctacacttcgtctgcaagttacatgaaaatggttgtacatggagcttgggcgcatgcaattcaaagaggcataacaaatggattatcaagagtatcagaggtcatcacacttgtctcgtgccgatgcttacacaagatcatcgccaactcgacaaacacgtcatagcacagatcatccaaccaattgtcaaaacaaacccaactgtctccatcaagacattgattgcagagattaaaacgttcatgaattataccccatcctacaagaagacatggttagcaaagcaaaaagcattggagatgattcatggaaactgggaagaatcatatgccaaactgccaaaacttttcggagctttgcaatcttgtgttcccgggactgtggtcgctgctcaaacagaatccttgtatgaggggggagaaatagtaccgggcaaaagattgtttaaacgtgtcttttggtcatttggtccatgcattaatggttttgcatattgcaaacccattgtacaagtagatggtacatggctttacggaaagtatactggcacactgttgatagctaccgcacaagatggaactaaccatatcttcccgatttcctatgccattgtagaaggggagacaacttcagcttgggggttttttctaaagaatttgagaagacatgttactccgcaaattaacatttctcttatttcagaccgacacccctcaattataagtgcctacaacaacccaagtaacttatgggtccaggacacatcccatttcttttgcctgcgccacattgcacaaaactttcttcgtggtaactcaaactgcaaacatttaaagaaaccacttatgttggctggtgagaatctattttatttattcgttataattttctttcaatcaaattttataacataatacattgattaaatatttacagggtacgcatacacagagaagatgcactggcgacatcttggggatattcgtgcgaataagccaagtgcagctgaatg

SEQ ID NO: 15514 - DNA, 1039 bp, Glycine max
  Gm_smallRNAprecursor_8347
agcaatcaaagaatacaacatcagaaatcattttgattgcagaacaatttactctgaccaaagaaggctacacttcgtctgcaagttacatgaaaatggttgtacatggagcttgggcgcatgcaattcaaagaggcataacaaatggattatcaagagtatcagaggtcatcacacttgtctcgtgccgatgcttacacaagatcatcgccaactcgacaaacacgtcatagcacagatcatccaaccaattgtcaaaacaaacccaactgtctccatcaagacattgattgcagagattaaaacgttcatgaattataccccatcctacaagaagacatggttagcaaagcaaaaagcattggagatgattcatggaaactgggaagaatcatatgccaaactgccaaaacttttcggagctttgcaatcttgtgttcccgggactgtggtcgctgctcaaacagaatccttgtatgaggggggagaaatagtaccgggcaaaagattgtttaaacgtgtcttttggtcatttggtccatgcattaatggttttgcatattgcaaacccattgtacaagtagatggtacatggctttacggaaagtatactggcacactgttgatagctaccgcacaagatggaactaaccatatcttcccgatttcctatgccattgtagaaggggagacaacttcagcttgggggttttttctaaagaatttgagaagacatgttactccgcaaattaacatttctcttatttcagaccgacacccctcaattataagtgcctacaacaacccaagtaacttatgggtccaggacacatcccatttcttttgcctgcgccacattgcacaaaactttcttcgtggtaactcaaactgcaaacatttaaagaaaccacttatgttggctggtgagaatctattttatttattcgttataattttctttcaatcaaattttataacataatacattgattaaatatttacagggtacgcatacacagagaagatgcactggcgacat

SEQ ID NO: 15515 - DNA, 1051 bp, Glycine max
  Gm_smallRNAprecursor_8348
actggcgacatcttggggatattcgtgcgaataagccaagtgcagctgaatggcttgatcaattacccaaacaaaaatgggtacaatgctttgatgaggggaagcgttggggacatattactaccaatttgtcggagtctgttaattccatgttcaaaaacacaagacatttgccggtgtcatcattggttgaggagacctatttcaaggccgcacaactcttggctaatagaggtcgacaaactcaggcaatgatcaactccggctcacagtattctgaagtcgtcttcgatgcaatcaatagtggtcaacaagaatctaatacacacattgtaaatgaattcgacagacacaatcacacttttattataaccgagactcaatccccacttgaaacacccagaccacctggaaggtttagagtaatgttacaatcccaaaagtgtgattgtggtgaatttcaggctaaacatttaccgtgttctcacgtcatggctgcctgtaaatctgtcaatgttgatcccatgacctatgtgccgatgatattcactttacaacacattttgcacatctacgacaactcctttggtttattgccacacgaatcaatgtggcaagaatatgaaggagatcagtggggtcctgatccaaggagaaagaggactgtaaagggttgtcccgtttcaactcgcattcctactgagatggacgaagacgaaaatgaacgagcaagtagaaaaaaatgtggactttgtcggcaacatggtcatagcagaaataattgtcctaatgtatcctcatcttagtttttccttagacaaatgtcattgtttaaatattttattgatgacgtagtataatgttcttatataaataaattgttaaaagctttagttttatcatttttaattaaatctaaaaacataaacaaactaattatatttagtaaaatagttaaattaaaaattttaaaattcagattattatacaaaataaatatttactaaaataaatatattattatacaaaatttaaattttaaaacatatat

SEQ ID NO: 15516 - DNA, 1052 bp, Glycine max
  Gm_smallRNAprecursor_8349
actggcgacatcttggggatattcgtgcgaataagccaagtgcagctgaatggcttgatcaattacccaaacaaaaatgggtacaatgctttgatgaggggaagcgttggggacatattactaccaatttgtcggagtctgttaattccatgttcaaaaacacaagacatttgccggtgtcatcattggttgaggagacctatttcaaggccgcacaactcttggctaatagaggtcgacaaactcaggcaatgatcaactccggctcacagtattctgaagtcgtcttcgatgcaatcaatagtggtcaacaagaatctaatacacacattgtaaatgaattcgacagacacaatcacacttttattataaccgagactcaatccccacttgaaacacccagaccacctggaaggtttagagtaatgttacaatcccaaaagtgtgattgtggtgaatttcaggctaaacatttaccgtgttctcacgtcatggctgcctgtaaatctgtcaatgttgatcccatgacctatgtgccgatgatattcactttacaacacattttgcacatctacgacaactcctttggtttattgccacacgaatcaatgtggcaagaatatgaaggagatcagtggggtcctgatccaaggagaaagaggactgtaaagggttgtcccgtttcaactcgcattcctactgagatggacgaagacgaaaatgaacgagcaagtagaaaaaaatgtggactttgtcggcaacatggtcatagcagaaataattgtcctaatgtatcctcatcttagtttttccttagacaaatgtcattgtttaaatattttattgatgacgtagtataatgttcttatataaataaattgttaaaagctttagttttatcatttttaattaaatctaaaaacataaacaaactaattatatttagtaaaatagttaaattaaaaattttaaaattcagattattatacaaaataaatatttactaaaataaatatattattatacaaaatttaaattttaaaacatatatt

SEQ ID NO: 15517 - DNA, 1051 bp, Glycine max
  Gm_smallRNAprecursor_8350
tatttcaaggccgcacaactcttggctaatagaggtcgacaaactcaggcaatgatcaactccggctcacagtattctgaagtcgtcttcgatgcaatcaatagtggtcaacaagaatctaatacacacattgtaaatgaattcgacagacacaatcacacttttattataaccgagactcaatccccacttgaaacacccagaccacctggaaggtttagagtaatgttacaatcccaaaagtgtgattgtggtgaatttcaggctaaacatttaccgtgttctcacgtcatggctgcctgtaaatctgtcaatgttgatcccatgacctatgtgccgatgatattcactttacaacacattttgcacatctacgacaactcctttggtttattgccacacgaatcaatgtggcaagaatatgaaggagatcagtggggtcctgatccaaggagaaagaggactgtaaagggttgtcccgtttcaactcgcattcctactgagatggacgaagacgaaaatgaacgagcaagtagaaaaaaatgtggactttgtcggcaacatggtcatagcagaaataattgtcctaatgtatcctcatcttagtttttccttagacaaatgtcattgtttaaatattttattgatgacgtagtataatgttcttatataaataaattgttaaaagctttagttttatcatttttaattaaatctaaaaacataaacaaactaattatatttagtaaaatagttaaattaaaaattttaaaattcagattattatacaaaataaatatttactaaaataaatatattattatacaaaatttaaattttaaaacatatattcaccaaaaaatatcttaaataatttaaataatataacaaaaacacttaaatttaataatatcattttcttaataacaaaattaaattataaattaatattacataaattaatttaataaataactaattttcaaattatttaaaaataattttatataatataatatttaattttaataatataaaaacttttttataa

SEQ ID NO: 15518 - DNA, 1178 bp, Glycine max
  Gm_smallRNAprecursor_8351
acacaatgtacaaccaccaatcggtatactcgaggttggcatgaccttcgatgacaaagcacaatgtattcgtgcagtcaaagaatacaacatcagaaatcatttagattgcacaacaatttactctgaccagagaaggctaaacttcgtctgtaagttacatgaaaatggttgtccatggagcttgagcgcatgtaattcaaagaggcataacaaatggattatcaagagtatcagaggtcatcacacttgtcttgtgccaatgctcagataagatcatcgtcaactcgacaaacacgtcataacacagatcatccaaccaattgtcaaaacaaacccaactgtctccatcaagacgttgattgcagagatcaaaacattcatgaattataccccatcctacaagaaaacacggttaggaaagtaaagagcgttggagatgattcatggaaactgggaagaatcatacgccaaactgccaaaaattttcggagctttgcaatcttgtgttcccaggactgtggtccctgctcaaacataatccttttatgaggggggagaaatagtaccgggcaaaagattgtttaaacgtgtcttttggtcatttgatccatgcattaatggttttgtatattgcaaacccatagtacaagtagatggtacatggctttacaagaagtatactggcacactgttgatagctaccacacaagatagaactaaccatatcttcccgattgcctacaccattgtagaaggggagacaacttcagcttaggggttttttttaaagaatttgagaagacatgttactccgcaaattaacatttctctcacttcagaccgacacccctcaattataagtgcctacaacaactaaagtaacttatgggtccaggacacatctcatttcttttgcctacgccacattgcacaaaactttgttcgcagtaactcaaactgcaaacatttaaagaaaccactcatgttggctggtgagaatctattttatttatttattaaaattttctatcaatcaaattttataacataatagattgattgaatatttacaggttacacatacacagagaagatgcactggagacatcttggggatatccatgcgaataagccaactgcaactgaatggcttgatcaattacccagacaaaaat

SEQ ID NO: 15519 - DNA, 1069 bp, Glycine max
  Gm_smallRNAprecursor_8352
tttcttgtcatgttgatcaaatatataaattaagtctgatctaattgatggtgacgttttgtggatgtaagataaacatgtttcagaacatatttgaaatgaggaagaagacagaaaattacacattagacgagctgtccccacgtattaaggttaagaagaaataccagaggaaattatttctctacttcggcaatctggtttttactggatggattatgaagatgagatacttaaaaataaatgcggcattaattagtgccttgattgaaagatggaggcccgaaacatatacttttcacaagagatgcggagtgtactattactcttcaagatgtctctattttattaggtatttgtgtggatgagtcaccattaattggtctaacaaaccttgattgaactgatttatgtgaagaattgttaggactcagaccacaagaagatgaacttcaaggtattacgattaaattaagttggtttacttatcattttccacaattaaataaccatggcggtaacctacaacaagtagaaaggtttacccatgtatgcatcctgagattcataggaggtgtcttatttgttgacaaaagcagtagcaaagtttctctaaggtacctgtaattttttttttacgtgactttagagagtgcaacacgtatgcatgtggacctgttgtacttgcttatttatatagagagatgtgcagcgtcatcgattataaaactaaatcaattggagatatgtgcattttaatacaaatgtagatatgagaaggatgtacaagtttggctccaaagaggactctccccttaatagagaataaaccactcggacacaggttagtcatttaaaaaattagatttcatttcaaattaattaataatgtaatgtattgacaatgatgatttgataattttttcaggtgtctacgacgtggaaatcaacataatgatgatttgataatttttcgtcgcaaattagatattatgaaacgacatgaggtaataacatgttaatgtattggttaaataataaataatatgtcatatttcactgaaaataa

SEQ ID NO: 15520 - DNA, 1166 bp, Glycine max
  Gm_smallRNAprecursor_8353
attttactgttttttttcttatatgtaaatataaataatataaggttatgccatagggacatggtcatttttacccctaacaatcttagaagtaaatatagaccatgtttttatgccatacccttataccatttatatttacatattagcaaaaagaaacagtaaaatcttaaggacaaatagttaagaaacttgttcattagctgcaaatatccttccctcctcaagtgcaaacttcttgcgtagccgctcttggtgctcagaaaatcccaaaaacaaatccctcttattactagctattttgaattctttagttcctgaatatacaaccttcaaattgttgctcgttcccctctttgagaatgaggaggatcttcataggacttcatccagctgatgtttgtcggcagtttcatcatccaccacccttttcttttgtgccttctcacgttcattgttgttaaacccatatttatgccttcttcccttcatgtcttgtttgatcacaactttagctgaatctcccatcttcagcatagttgaatctcctgtcttattgtccaatgccacattttgatggcctgtatctcttttgttcgtattttctactgcttcagcttcacaatgcatagagcaatcagaattttcgagtcatcaccaaaggcttctgcatcagcgttgacactctccaccctctttggtttatgcttctgtgttttcttccatgcttcctccttacaattctcagatttattggaggtcacactagaaggatcagcaccaatccgtgcctgttcctcctctaccagctcaatatctttcctttcacctttgcttttgaaaactacagtgtaatttacaaaacaaaagatgaaaggaaagatattgacctgatagacgaggaagaagcacagattggtggtgatcgatctagtgcaacctcgaataaagttgagatttataacgaggaggcacggaagaaaacacagaagcataaaccaaagagggtggagagtgtcaatgctgatgcagaagcctttggtgatcactcggaaattctgattgctttatgcattctgaagctgaagcactagaacatatgaagaaaagagatacaggccatcaaagtgtggcattggacaatgagacaggagtttcaactatgc

SEQ ID NO: 15521 - DNA, 1051 bp, Glycine max
  Gm_smallRNAprecursor_8354
ggaaacaagaagagaaggtaactcttctgaacttatcttttactcttaacgtcttgcctcatatttctttattttttcagagtcaaaagaaatatgatagcattgatactaccacgacttcaaaacgctcgaagcatgcggtcgtcgaattagacgaagagaaagatgcaagttttatttctaatgtcaatattatagctttctttcaagtctatattctgacaattctttaccctcgtaatgcaggaagaagaggaaagacctcttataagaaaaagaaagttacctgcgacttcgaccaagtctgctgaacaaacagaggcaggcaattcccaggctcaaatgcctaagaagaaaaagaaagtgaagcaggtcgagcctgaaccttctgtggctgttgagggtggtgagccaatcaagaagaaaaagaaaaagaccaagccttcaaaagaacaaggtgacaatcaacctgttgacgtccaaccaccttcgaccgatattgacggcactgaagtagaggctactccttctgttgctgagatgggcaaccctgtcgatcaaccggactcaccaccagaacaacctgccgtcgaggtatcatcctcttaatgtgttttaaatcatagcttatacgaaactatttgttaacctttttccatgataattcgaatcaggtacaacaaaatgtttctgtagaagaaataccctcacatgctcgaacatctcccgctcctgagacggatgcagtgaatgttgaggaacagggtgaaggtcaaggcattggatccagcagtcctcatggatcgagtcagaaaagttcatctgaagaaaacttttccgatgaagaggccatagaagaggctgaagctggaggttcggacatttacccggcgtcttcgacatctaagctttcgaagaggctgaagctggaggttcggacatttacccggcgtcttcgacatctaagctttccgctagcatagggatcgcagaagatacattcattcaaatgcaagacgaagaccctgctgcagcccttcgactcctgctg

SEQ ID NO: 15522 - DNA, 1038 bp, Glycine max
  Gm_smallRNAprecursor_8355
ggttataaccagaataaccatctaacatgcttaaaaattcgaagccagctgctgaatctaccaacatttccgctactggcataggatattcatctttaggtgtggcattatttaaatccctaaaatctatgcatactctaagagttccattctttttaatgacagggactatatttgctaaccattcgacatacctggcagatctgatgaatttacacctcagcagcctttcgatctcttccttaattttggacatgatttctggtgcgaatcttcttggtagttgttttactggtctttttccctccttaatcggtaatttcatttcgaccatttctctgcttaacccaggcatttcgtggtaatcccaagcaaaacagtctttaaattctctaagaagaagcaccaacttttcttttagacttaaggtgatattggcactgatataggttggcctttttatcgagccatctccaatgtcgatttcctccaaaggatcttgagcctgcatctttggcacctcacttatgggatttttctcaaaacccagcggctcatcatcataaatacaatccagtcttcgatcctttgtttctttgttttcatgatcttcgatcttggcttcaactgccatattttgttgagattcagcctcaaaggccgtatttagtctattttcggccatataagccgtaattctggcccatgcagtggcctcaatcatattaatcttcatatatattccacccagttggtggaatgactccatcttcagagggaacagcatcaatttcctccctctcccatataaacccataagtaggatggagtttgacagagtggataacattgtcacttgattcgacaacagcctccttgtcaccacaaggtgctatgttagccaactttttgtcaaaggtttgtgcagtaacattatcgacctctgacttatagaagctttgatccgcctctatattttcaacaatcccatcctccctccagataatgagtttctggtgaagggtagatggcacagcc

SEQ ID NO: 15523 - DNA, 1039 bp, Glycine max
  Gm_smallRNAprecursor_8356
ggcctttcaaatctagattgtgtgtttgttcttagataaggttatgagtgttgctaggtgcaccccgcattattgctgatatattataattaataaaataaataaatatatttaattatattataattaatgaaataaatatcttgtataattaataaaatttgtatttttcctcttacggatcaagttgatccggaagagacttctagatcaacttgatcctgaagaggaaaaccaaacaagggtaattttgtcatttttttagaatgttgggtgcaccagcaataatgctgggtgcacctagcaacactctaaggttattgggccttcttaagcctaggttgggccatacctaaaatagggtaggacatgattgctggtgcacccaacaattaggtgaatgggcaaaattgtccttgtgccaaagtttaaaaataaaactaattttaaaaaaaataattctttcttccgaaagaaggttcttccagtagaacaatttattctaccggaagaaccttcttccggagaagctactggaagaaggttcttctggaagaacaatttgttctatcagaagaactttcttccggaagaagaaattattttttttaatacaagggcaatttggcccattcacctaattgttgggtgcaccagcaatgttgctgggttcacctagcatgtcccaaatatggttgttgtttcttgcacttccaagttgcttcgtgcacctctttctttagaataaccagtccagaacgtaaacttacactccataatgattaaagattttggcttccggaatgaccaacctggtaggtaaaaaaatattctggaaaggatgcaggaagcaacaaaccctaaaatagtagcctctcaagtcgatagctcacggtaatgtggggtgctactaacttgctaaagtgtgcctaactttggtcacaggtcggattagatcctaaagtgcaatatgccaaagttggttgctcatggtagcatggagtttgacttgttaatgtctctccgacatctaagatgg

SEQ ID NO: 15524 - DNA, 1033 bp, Glycine max
  Gm_smallRNAprecursor_8357
aggtaaagaacggatgcgcctatggtcgagggtgtagtgcttcatagggaggtgaggaggacgaaggtgagaaaaaaatatattttcaaaatataaaaaaaaactgaaaaaaaggaatttaggagaaaaatatgttttcaaaaagaaaaggccaattagtaaaagttggtgaatcaaataagttgactcatgacatgtcacatgaagatcatgtttttcttgcaatctcatggattataataattaggtaaaattgtaaatttggtcccccaatttgtttctaattttgattttggtccccctttaaaattattgacgaattttatcctcctatttgatccaatcacataatcttggtcccccagtccagaattggacgttgactgttacaaaggaatattgactgtcacgtgtcacgttcttattagatgatggttgtcacatgtcatattctgattggtcaatgacaacaacaatgcatgtcatctttcatggagttgacatccaatcagaacatgacacgtgacagtcatcatccaataagaacgtgacacaaggtagtcaacattcctttgtaatagtcaacattcaagtctgaactagggtatcaagattttgtgattggataaaataggaggacaaaatttgtcaataattttaaagggagaccaaaatcaaaattgaagacaaattggggaaccaaatttataattttgcctaataatttcccgaaaggtagttatccatcaagataattgttcttttttttaccagcaaatgtcagtttgctagtttgttaactttattaaaaatatttgttggagagaatttaacttgtgacttctctctcatccctttctttcttgatccttttcttacccttggttaacttatatctcccaagacaattgtcccttaaagatgacaattagtgacatcacaactacaagatcatttgaggcaattgtcttaagcccttgattaaataatttttatttttttataattaggtgataaatttaatgtggcattg

SEQ ID NO: 15525 - DNA, 1080 bp, Glycine max
  Gm_smallRNAprecursor_8358
aagacaagtagttttgactgagactttaatggctacaggataggtagtattgtccagcattaattacacattaattacaaatagacggttttgtgaccgaaattaaatttaatctaaacagataccaaaacaatcatcttcgttttggtaaaaggggtcttcttcttcagaagaagaagaacttgtttcttccttctttgaggatgaaccttcttcttcctgctgtaacatttgcagaacttcctttagatttttagttaggacctcctttgattttgatcctgctaaaaatgctgccagatgagacttttggttcaaaaacacagaagtttctggatcagctgctttgaggaattttggatgggattggaaccagagttttacttgttcttgatctgctttggatgagtcaaattgtgtccaccattttacaaatgtgtgtctttgtagtgatggatattggtttgtcttttcagtcttgctgtaacgatattgccatgagaagatccatgacagtgcaaagcttgaaaagtatttaagatctgctagaattcgtgattcctgcgaattgtattgtctctcaaattgagcaaatccttgttggactatttctgggaatatctctggaattggtccaaagaagtcccaccattgcaaaaaccaattgggaaaattgtaaattgtattggtcttgaaatatatcagccatgaatgcttgaagcgggtattttggtgccaaaacaccttagtccaagcatcaacataatcccaataggtataacctaccagatcaaatggaactgaaaatctctttcctttgttcaagtccgaaccaaagtgtcttggttgaagaacttttagtatttggattgtggagtgggtgtttaatgtttggtcttttgggtctttgaaatgtttgatagatactgaatttgaatctaccaaaatcaattcataaaaagttcttgtcttcaggatggtggttggttgtagtgaaatcctggtgggaaagccttggccgtcgccttgaagggatttttgtcccaaaattcaggttccatctgcaaaacagttacaaat

SEQ ID NO: 15526 - DNA, 1060 bp, Glycine max
  Gm_smallRNAprecursor_8359
agactttaatggctacaggataggtagtattgtccagcattaattacacattaattacaaatagacggttttgtgaccgaaattaaatttaatctaaacagataccaaaacaatcatcttcgttttggtaaaaggggtcttcttcttcagaagaagaagaacttgtttcttccttctttgaggatgaaccttcttcttcctgctgtaacatttgcagaacttcctttagatttttagttaggacctcctttgattttgatcctgctaaaaatgctgccagatgagacttttggttcaaaaacacagaagtttctggatcagctgctttgaggaattttggatgggattggaaccagagttttacttgttcttgatctgctttggatgagtcaaattgtgtccaccattttacaaatgtgtgtctttgtagtgatggatattggtttgtcttttcagtcttgctgtaacgatattgccatgagaagatccatgacagtgcaaagcttgaaaagtatttaagatctgctagaattcgtgattcctgcgaattgtattgtctctcaaattgagcaaatccttgttggactatttctgggaatatctctggaattggtccaaagaagtcccaccattgcaaaaaccaattgggaaaattgtaaattgtattggtcttgaaatatatcagccatgaatgcttgaagcgggtattttggtgccaaaacaccttagtccaagcatcaacataatcccaataggtataacctaccagatcaaatggaactgaaaatctctttcctttgttcaagtccgaaccaaagtgtcttggttgaagaacttttagtatttggattgtggagtgggtgtttaatgtttggtcttttgggtctttgaaatgtttgatagatactgaatttgaatctaccaaaatcaattcataaaaagttcttgtcttcaggatggtggttggttgtagtgaaatcctggtgggaaagccttggccgtcgccttgaagggatttttgtcccaaaattcaggttccatctgcaaaacagttacaaat

SEQ ID NO: 15527 - DNA, 1114 bp, Glycine max
  Gm_smallRNAprecursor_8360
agactttaatggctacaggataggtagtattgtccagcattaattacacattaattacaaatagacggttttgtgaccgaaattaaatttaatctaaacagataccaaaacaatcatcttcgttttggtaaaaggggtcttcttcttcagaagaagaagaacttgtttcttccttctttgaggatgaaccttcttcttcctgctgtaacatttgcagaacttcctttagatttttagttaggacctcctttgattttgatcctgctaaaaatgctgccagatgagacttttggttcaaaaacacagaagtttctggatcagctgctttgaggaattttggatgggattggaaccagagttttacttgttcttgatctgctttggatgagtcaaattgtgtccaccattttacaaatgtgtgtctttgtagtgatggatattggtttgtcttttcagtcttgctgtaacgatattgccatgagaagatccatgacagtgcaaagcttgaaaagtatttaagatctgctagaattcgtgattcctgcgaattgtattgtctctcaaattgagcaaatccttgttggactatttctgggaatatctctggaattggtccaaagaagtcccaccattgcaaaaaccaattgggaaaattgtaaattgtattggtcttgaaatatatcagccatgaatgcttgaagcgggtattttggtgccaaaacaccttagtccaagcatcaacataatcccaataggtataacctaccagatcaaatggaactgaaaatctctttcctttgttcaagtccgaaccaaagtgtcttggttgaagaacttttagtatttggattgtggagtgggtgtttaatgtttggtcttttgggtctttgaaatgtttgatagatactgaatttgaatctaccaaaatcaattcataaaaagttcttgtcttcaggatggtggttggttgtagtgaaatcctggtgggaaagccttggccgtcgccttgaagggatttttgtcccaaaattcaggttccatctgcaaaacagttacaaatttatttttataaatataattgttagtttgtttggtaggtggtgtttgagctttg

SEQ ID NO: 15528 - DNA, 1174 bp, Glycine max
  Gm_smallRNAprecursor_8361
gcgggtattttggtgccaaaacaccttagtccaagcatcaacataatcccaataggtataacctaccagatcaaatggaactgaaaatctctttcctttgttcaagtccgaaccaaagtgtcttggttgaagaacttttagtatttggattgtggagtgggtgtttaatgtttggtcttttgggtctttgaaatgtttgatagatactgaatttgaatctaccaaaatcaattcataaaaagttcttgtcttcaggatggtggttggttgtagtgaaatcctggtgggaaagccttggccgtcgccttgaagggatttttgtcccaaaattcaggttccatctgcaaaacagttacaaatttatttttataaatataattgttagtttgtttggtaggtggtgtttgagctttggctaaaggcagtttccctttaggattggtagctgttttggtcattgatgcattttggattattgtttgtaaatttgatttagattcatcatcagattctgaggcaatgtctgcccaagattttttgattatttttggaaatttggttagacccatgtcttgaagggcctaaagggtttcaattggccatgcatagtcgaccgatgtttgtttggcggttgccggtttgggagattcctgagtggatggctcaggtttgattgaggcaatctgggttgatgacccttctaaattggttttctgggtagatgacccagccggggttggtgacccagaagaggttgatgatttcttaatggttggctctggaagagccagtttggctcctttgcctgtacttcttcctccccttagggagattcctgatgccttaggaggcattaccacttttctgtaagaattcacgggtaaggtagtcaggcattgaatttgaggtgcccttgatgtattctatgtcaaaatcaaagacacttagaattgcttgtcatcttgcaaaaatttgttttgaggcaaggtttttaacatctttttgtaaaatatctttggcttatttacaatcaactctgattaaaaaaatttggtttaataaatccgattgaaatttggaaatgcacaaaacaattgctaaaacttcctttttaacagttgaatattttaattgtgtaggattccaaagttttgatgtatatgcaatgacatga

SEQ ID NO: 15529 - DNA, 1173 bp, Glycine max
  Gm_smallRNAprecursor_8362
cgggtattttggtgccaaaacaccttagtccaagcatcaacataatcccaataggtataacctaccagatcaaatggaactgaaaatctctttcctttgttcaagtccgaaccaaagtgtcttggttgaagaacttttagtatttggattgtggagtgggtgtttaatgtttggtcttttgggtctttgaaatgtttgatagatactgaatttgaatctaccaaaatcaattcataaaaagttcttgtcttcaggatggtggttggttgtagtgaaatcctggtgggaaagccttggccgtcgccttgaagggatttttgtcccaaaattcaggttccatctgcaaaacagttacaaatttatttttataaatataattgttagtttgtttggtaggtggtgtttgagctttggctaaaggcagtttccctttaggattggtagctgttttggtcattgatgcattttggattattgtttgtaaatttgatttagattcatcatcagattctgaggcaatgtctgcccaagattttttgattatttttggaaatttggttagacccatgtcttgaagggcctaaagggtttcaattggccatgcatagtcgaccgatgtttgtttggcggttgccggtttgggagattcctgagtggatggctcaggtttgattgaggcaatctgggttgatgacccttctaaattggttttctgggtagatgacccagccggggttggtgacccagaagaggttgatgatttcttaatggttggctctggaagagccagtttggctcctttgcctgtacttcttcctccccttagggagattcctgatgccttaggaggcattaccacttttctgtaagaattcacgggtaaggtagtcaggcattgaatttgaggtgcccttgatgtattctatgtcaaaatcaaagacacttagaattgcttgtcatcttgcaaaaatttgttttgaggcaaggtttttaacatctttttgtaaaatatctttggcttatttacaatcaactctgattaaaaaaatttggtttaataaatccgattgaaatttggaaatgcacaaaacaattgctaaaacttcctttttaacagttgaatattttaattgtgtaggattccaaagttttgatgtatatgcaatgacatga

SEQ ID NO: 15530 - DNA, 1176 bp, Glycine max
  Gm_smallRNAprecursor_8363
cgggtattttggtgccaaaacaccttagtccaagcatcaacataatcccaataggtataacctaccagatcaaatggaactgaaaatctctttcctttgttcaagtccgaaccaaagtgtcttggttgaagaacttttagtatttggattgtggagtgggtgtttaatgtttggtcttttgggtctttgaaatgtttgatagatactgaatttgaatctaccaaaatcaattcataaaaagttcttgtcttcaggatggtggttggttgtagtgaaatcctggtgggaaagccttggccgtcgccttgaagggatttttgtcccaaaattcaggttccatctgcaaaacagttacaaatttatttttataaatataattgttagtttgtttggtaggtggtgtttgagctttggctaaaggcagtttccctttaggattggtagctgttttggtcattgatgcattttggattattgtttgtaaatttgatttagattcatcatcagattctgaggcaatgtctgcccaagattttttgattatttttggaaatttggttagacccatgtcttgaagggcctaaagggtttcaattggccatgcatagtcgaccgatgtttgtttggcggttgccggtttgggagattcctgagtggatggctcaggtttgattgaggcaatctgggttgatgacccttctaaattggttttctgggtagatgacccagccggggttggtgacccagaagaggttgatgatttcttaatggttggctctggaagagccagtttggctcctttgcctgtacttcttcctccccttagggagattcctgatgccttaggaggcattaccacttttctgtaagaattcacgggtaaggtagtcaggcattgaatttgaggtgcccttgatgtattctatgtcaaaatcaaagacacttagaattgcttgtcatcttgcaaaaatttgttttgaggcaaggtttttaacatctttttgtaaaatatctttggcttatttacaatcaactctgattaaaaaaatttggtttaataaatccgattgaaatttggaaatgcacaaaacaattgctaaaacttcctttttaacagttgaatattttaattgtgtaggattccaaagttttgatgtatatgcaatgacatgatct

SEQ ID NO: 15531 - DNA, 1143 bp, Glycine max
  Gm_smallRNAprecursor_8364
cttttgggtctttgaaatgtttgatagatactgaatttgaatctaccaaaatcaattcataaaaagttcttgtcttcaggatggtggttggttgtagtgaaatcctggtgggaaagccttggccgtcgccttgaagggatttttgtcccaaaattcaggttccatctgcaaaacagttacaaatttatttttataaatataattgttagtttgtttggtaggtggtgtttgagctttggctaaaggcagtttccctttaggattggtagctgttttggtcattgatgcattttggattattgtttgtaaatttgatttagattcatcatcagattctgaggcaatgtctgcccaagattttttgattatttttggaaatttggttagacccatgtcttgaagggcctaaagggtttcaattggccatgcatagtcgaccgatgtttgtttggcggttgccggtttgggagattcctgagtggatggctcaggtttgattgaggcaatctgggttgatgacccttctaaattggttttctgggtagatgacccagccggggttggtgacccagaagaggttgatgatttcttaatggttggctctggaagagccagtttggctcctttgcctgtacttcttcctccccttagggagattcctgatgccttaggaggcattaccacttttctgtaagaattcacgggtaaggtagtcaggcattgaatttgaggtgcccttgatgtattctatgtcaaaatcaaagacacttagaattgcttgtcatcttgcaaaaatttgttttgaggcaaggtttttaacatctttttgtaaaatatctttggcttatttacaatcaactctgattaaaaaaatttggtttaataaatccgattgaaatttggaaatgcacaaaacaattgctaaaacttcctttttaacagttgaatattttaattgtgtaggattccaaagttttgatgtatatgcaatgacatgatcttggccatggattctttgtttgaggatgccaccataacctatgtctgaagcatcagtttcgacaattttaaatgcctgtggaataggaagatacaaacattttatggattagactttgactttgatttctttaactgtttgtg

SEQ ID NO: 15532 - DNA, 1129 bp, Glycine max
  Gm_smallRNAprecursor_8365
ctgcaaaacagttacaaatttatttttataaatataattgttagtttgtttggtaggtggtgtttgagctttggctaaaggcagtttccctttaggattggtagctgttttggtcattgatgcattttggattattgtttgtaaatttgatttagattcatcatcagattctgaggcaatgtctgcccaagattttttgattatttttggaaatttggttagacccatgtcttgaagggcctaaagggtttcaattggccatgcatagtcgaccgatgtttgtttggcggttgccggtttgggagattcctgagtggatggctcaggtttgattgaggcaatctgggttgatgacccttctaaattggttttctgggtagatgacccagccggggttggtgacccagaagaggttgatgatttcttaatggttggctctggaagagccagtttggctcctttgcctgtacttcttcctccccttagggagattcctgatgccttaggaggcattaccacttttctgtaagaattcacgggtaaggtagtcaggcattgaatttgaggtgcccttgatgtattctatgtcaaaatcaaagacacttagaattgcttgtcatcttgcaaaaatttgttttgaggcaaggtttttaacatctttttgtaaaatatctttggcttatttacaatcaactctgattaaaaaaatttggtttaataaatccgattgaaatttggaaatgcacaaaacaattgctaaaacttcctttttaacagttgaatattttaattgtgtaggattccaaagttttgatgtatatgcaatgacatgatcttggccatggattctttgtttgaggatgccaccataacctatgtctgaagcatcagtttcgacaattttaaatgcctgtggaataggaagatacaaacattttatggattagactttgactttgatttctttaactgtttgtgtatggaggtcagaccaaggaggcggatttttcttcagcctatcatgcaatggcttgacaatattgtttaaatagggggaaaattctcctacgtaatttagacaacctagaaatctttgtaactgggttttgtctaagatttggttgggaaa

SEQ ID NO: 15533 - DNA, 1115 bp, Glycine max
  Gm_smallRNAprecursor_8366
caaatttatttttataaatataattgttagtttgtttggtaggtggtgtttgagctttggctaaaggcagtttccctttaggattggtagctgttttggtcattgatgcattttggattattgtttgtaaatttgatttagattcatcatcagattctgaggcaatgtctgcccaagattttttgattatttttggaaatttggttagacccatgtcttgaagggcctaaagggtttcaattggccatgcatagtcgaccgatgtttgtttggcggttgccggtttgggagattcctgagtggatggctcaggtttgattgaggcaatctgggttgatgacccttctaaattggttttctgggtagatgacccagccggggttggtgacccagaagaggttgatgatttcttaatggttggctctggaagagccagtttggctcctttgcctgtacttcttcctccccttagggagattcctgatgccttaggaggcattaccacttttctgtaagaattcacgggtaaggtagtcaggcattgaatttgaggtgcccttgatgtattctatgtcaaaatcaaagacacttagaattgcttgtcatcttgcaaaaatttgttttgaggcaaggtttttaacatctttttgtaaaatatctttggcttatttacaatcaactctgattaaaaaaatttggtttaataaatccgattgaaatttggaaatgcacaaaacaattgctaaaacttcctttttaacagttgaatattttaattgtgtaggattccaaagttttgatgtatatgcaatgacatgatcttggccatggattctttgtttgaggatgccaccataacctatgtctgaagcatcagtttcgacaattttaaatgcctgtggaataggaagatacaaacattttatggattagactttgactttgatttctttaactgtttgtgtatggaggtcagaccaaggaggcggatttttcttcagcctatcatgcaatggcttgacaatattgtttaaatagggggaaaattctcctacgtaatttagacaacctagaaatctttgtaactgggttttgtctaagatttggttgggaaa

SEQ ID NO: 15534 - DNA, 1232 bp, Glycine max
  Gm_smallRNAprecursor_8367
aattgcttgtcatcttgcaaaaatttgttttgaggcaaggtttttaacatctttttgtaaaatatctttggcttatttacaatcaactctgattaaaaaaatttggtttaataaatccgattgaaatttggaaatgcacaaaacaattgctaaaacttcctttttaacagttgaatattttaattgtgtaggattccaaagttttgatgtatatgcaatgacatgatcttggccatggattctttgtttgaggatgccaccataacctatgtctgaagcatcagtttcgacaattttaaatgcctgtggaataggaagatacaaacattttatggattagactttgactttgatttctttaactgtttgtgtatggaggtcagaccaaggaggcggatttttcttcagcctatcatgcaatggcttgacaatattgtttaaatagggggaaaattctcctacgtaatttagacaacctagaaatctttgtaactgggttttgtctaagatttggttgggaaatttgctagcaaactctattgacctttctattggaatgattgtaccttgatatatattgtgaccaaggaatcgaattcgagtttggaaaagattgatttttgatttggagactaccaaaccattttgtttgatgatatggatgaaagtctggagatgtttgaaatgttggtcaatgttttgggaaaagattaaaacatcatctatgtagacaatgacaaattttgaatagggattaaaaatatcattcataattttttgaaattctgaaggggcattcttcagtccgaatgacattacattccattcatattgcctgaaaggtacaataaacactgctttgtacctatctgattcttggatttggattttccagaatccagatttcatgtcaaattttgaaaatatctttgcagaatttaatctattaagtaagtcttttttgtttggaataagatacctaatccattgtaatgcttgatttagtggtttgtaatttatgactaagcgaggcgttccacgctcaatctcagattgtttgttgacataaaaagccgcacaagaccatgggcttttgcttttccagattaggcctttatcaagcaaatccttgatttccttttggcagtattgaagagttcttcgttcatttggattggtctggcttttgttggaatttgtttttccctaaagcctttctcataagggagatc

SEQ ID NO: 15535 - DNA, 1240 bp, Glycine max
  Gm_smallRNAprecursor_8368
aatggcttgacaatattgtttaaatagggggaaaattctcctacgtaatttagacaacctagaaatctttgtaactgggttttgtctaagatttggttgggaaatttgctagcaaactctattgacctttctattggaatgattgtaccttgatatatattgtgaccaaggaatcgaattcgagtttggaaaagattgatttttgatttggagactaccaaaccattttgtttgatgatatggatgaaagtctggagatgtttgaaatgttggtcaatgttttgggaaaagattaaaacatcatctatgtagacaatgacaaattttgaatagggattaaaaatatcattcataattttttgaaattctgaaggggcattcttcagtccgaatgacattacattccattcatattgcctgaaaggtacaataaacactgctttgtacctatctgattcttggatttggattttccagaatccagatttcatgtcaaattttgaaaatatctttgcagaatttaatctattaagtaagtcttttttgtttggaataagatacctaatccattgtaatgcttgatttagtggtttgtaatttatgactaagcgaggcgttccacgctcaatctcagattgtttgttgacataaaaagccgcacaagaccatgggcttttgcttttccagattaggcctttatcaagcaaatccttgatttccttttggcagtattgaagagttcttcgttcatttggattggtctggcttttgttggaatttgtttttccctaaagcctttctcataagggagatcaacaatatgtttctttctatcccaaaatgcatgtgacaaatcagaacagacagttgattcaatatgatttaataaagattgaattttttcttttacttggggttttcccagttgtatctgaatattattaaaagatacttcttcttttaagaagttaatttgattaatcttattttctataagatttatatttctggagattggtttagtagaaaaattaaatataattttcttcctaagtaatttgtggttattcattcattagatatttgaataggaaacaaggctcgaatgaagggggttcctaggattactttgttcttaaggttttttaccagaagaaagtttgtgttaatcctaaaaccttggttctcaatgattgcatttgatagcttaaaattaaattttaattttgagccgtttgcc

SEQ ID NO: 15536 - DNA, 1076 bp, Glycine max
  Gm_smallRNAprecursor_8369
ctttcgagaagagttacttcatcccattttatttttcttgggagagaaacgttagcctttgtcatatcagtgataaacaaagttgtttctcttttttgaggttttagcaggactctagatgcacaagtattcatgaccttgtactggatcctataaattaaggctgctgggattgatcattttttcatttcaaggccatgaaagtggatgtttaagaacaaacagagagtcaagaatgtttctgtccatcagactcactgttttgtttggataacaattaaaatatattggaccttgtcctaggctagtttcgactgttccaattagggagtcttcaaatttattatgcctaatatctcttagacacattaaaactgctgcatctatgcctatgtcaattaagggcttgatggctacttgtacacagccgatgtgtagatatttatacttacgactatgttcataaattgaattttttgaaagtaaatgaaattcttcccctatatcttgtcctagaggaatattgttttctactattttgattatgtaatcaaagttgtgtttgtccttaattgtttcaggaacgtatagttgatcctgagggatttctggaatgttccagtcatccatgttttgattgatatcttcgaatcggacttcctcatcgaagagattgtgtttgggggcgacctcttaggtctggttatcttgatcacttaataaattggaatttcttgaagaagatgatgaagaagaatttgatcgaaaagagatacgggaaaaagagcgcaatagtctagacatgattataacattctctaatatctttgccttcatttggttccatagaaatatttccataaggctatatgttacaaaacttcttggatctgaacaaatgaaaaaagatttttttttacagacaatatagtttgaacactattcctatagccaccagtatattatgtttcaatattttatttgaacaatgcaccttagccttactgccctttctcaaccacaggacttactgctacagtatcattcaactaaaatatcagactgctgtgcttcca

SEQ ID NO: 15537 - DNA, 1159 bp, Glycine max
  Gm_smallRNAprecursor_8370
ctttcgagaagagttacttcatcccattttatttttcttgggagagaaacgttagcctttgtcatatcagtgataaacaaagttgtttctcttttttgaggttttagcaggactctagatgcacaagtattcatgaccttgtactggatcctataaattaaggctgctgggattgatcattttttcatttcaaggccatgaaagtggatgtttaagaacaaacagagagtcaagaatgtttctgtccatcagactcactgttttgtttggataacaattaaaatatattggaccttgtcctaggctagtttcgactgttccaattagggagtcttcaaatttattatgcctaatatctcttagacacattaaaactgctgcatctatgcctatgtcaattaagggcttgatggctacttgtacacagccgatgtgtagatatttatacttacgactatgttcataaattgaattttttgaaagtaaatgaaattcttcccctatatcttgtcctagaggaatattgttttctactattttgattatgtaatcaaagttgtgtttgtccttaattgtttcaggaacgtatagttgatcctgagggatttctggaatgttccagtcatccatgttttgattgatatcttcgaatcggacttcctcatcgaagagattgtgtttgggggcgacctcttaggtctggttatcttgatcacttaataaattggaatttcttgaagaagatgatgaagaagaatttgatcgaaaagagatacgggaaaaagagcgcaatagtctagacatgattataacattctctaatatctttgccttcatttggttccatagaaatatttccataaggctatatgttacaaaacttcttggatctgaacaaatgaaaaaagatttttttttacagacaatatagtttgaacactattcctatagccaccagtatattatgtttcaatattttatttgaacaatgcaccttagccttactgccctttctcaaccacaggacttactgctacagtatcattcaactaaaatatcagactgctgtgcttccagaaaatactgttcaaacacatactgtttaaattaaaacaattgtacatggttcagacacataagttcagttaacatatgccct

SEQ ID NO: 15538 - DNA, 1056 bp, Glycine max
  Gm_smallRNAprecursor_8371
ggaacgtatagttgatcctgagggatttctggaatgttccagtcatccatgttttgattgatatcttcgaatcggacttcctcatcgaagagattgtgtttgggggcgacctcttaggtctggttatcttgatcacttaataaattggaatttcttgaagaagatgatgaagaagaatttgatcgaaaagagatacgggaaaaagagcgcaatagtctagacatgattataacattctctaatatctttgccttcatttggttccatagaaatatttccataaggctatatgttacaaaacttcttggatctgaacaaatgaaaaaagatttttttttacagacaatatagtttgaacactattcctatagccaccagtatattatgtttcaatattttatttgaacaatgcaccttagccttactgccctttctcaaccacaggacttactgctacagtatcattcaactaaaatatcagactgctgtgcttccagaaaatactgttcaaacacatactgtttaaattaaaacaattgtacatggttcagacacataagttcagttaacatatgcccttacggatactattcctacttccccatcaagctctgataccggaggtcagcggaataagaacaaacggacaaataggaagtaagaatgcagtatgataaatggaaagaaaaatataaacttgtaaaacagatatcaagggcacaccggagaccggcttacaaatcccaggttttcataaacaaagaaaccgaagcggcggcagagccgcacaggatcggtaaagagagagaagagggatgaaaatatatatatatatatatatatatatatatatatatatatatatatatatatatatatataggttaagtctcttttcttaaatttgataaaattttggtataatgcatttttctttgttctctgggtgcatacttgactgtggtggaattgatgtcatcattttcatgtcgtgtacttagagatcaatgtgaaatgttgttgaaattttatcaaatctaagaaaagagacttaac

SEQ ID NO: 15539 - DNA, 1153 bp, Glycine max
  Gm_smallRNAprecursor_8372
ggaacgtatagttgatcctgagggatttctggaatgttccagtcatccatgttttgattgatatcttcgaatcggacttcctcatcgaagagattgtgtttgggggcgacctcttaggtctggttatcttgatcacttaataaattggaatttcttgaagaagatgatgaagaagaatttgatcgaaaagagatacgggaaaaagagcgcaatagtctagacatgattataacattctctaatatctttgccttcatttggttccatagaaatatttccataaggctatatgttacaaaacttcttggatctgaacaaatgaaaaaagatttttttttacagacaatatagtttgaacactattcctatagccaccagtatattatgtttcaatattttatttgaacaatgcaccttagccttactgccctttctcaaccacaggacttactgctacagtatcattcaactaaaatatcagactgctgtgcttccagaaaatactgttcaaacacatactgtttaaattaaaacaattgtacatggttcagacacataagttcagttaacatatgcccttacggatactattcctacttccccatcaagctctgataccggaggtcagcggaataagaacaaacggacaaataggaagtaagaatgcagtatgataaatggaaagaaaaatataaacttgtaaaacagatatcaagggcacaccggagaccggcttacaaatcccaggttttcataaacaaagaaaccgaagcggcggcagagccgcacaggatcggtaaagagagagaagagggatgaaaatatatatatatatatatatatatatatatatatatatatatatatatatatatatatataggttaagtctcttttcttaaatttgataaaattttggtataatgcatttttctttgttctctgggtgcatacttgactgtggtggaattgatgtcatcattttcatgtcgtgtacttagagatcaatgtgaaatgttgttgaaattttatcaaatctaagaaaagagacttaacctacacgcatgaatctactataaaaaaatatcttcttgaatgggatagggccacaccttttctgaaaaaaagtgcaatattcatggatggaataact

SEQ ID NO: 15540 - DNA, 1052 bp, Glycine max
  Gm_smallRNAprecursor_8373
cgtatagttgatcctgagggatttctggaatgttccagtcatccatgttttgattgatatcttcgaatcggacttcctcatcgaagagattgtgtttgggggcgacctcttaggtctggttatcttgatcacttaataaattggaatttcttgaagaagatgatgaagaagaatttgatcgaaaagagatacgggaaaaagagcgcaatagtctagacatgattataacattctctaatatctttgccttcatttggttccatagaaatatttccataaggctatatgttacaaaacttcttggatctgaacaaatgaaaaaagatttttttttacagacaatatagtttgaacactattcctatagccaccagtatattatgtttcaatattttatttgaacaatgcaccttagccttactgccctttctcaaccacaggacttactgctacagtatcattcaactaaaatatcagactgctgtgcttccagaaaatactgttcaaacacatactgtttaaattaaaacaattgtacatggttcagacacataagttcagttaacatatgcccttacggatactattcctacttccccatcaagctctgataccggaggtcagcggaataagaacaaacggacaaataggaagtaagaatgcagtatgataaatggaaagaaaaatataaacttgtaaaacagatatcaagggcacaccggagaccggcttacaaatcccaggttttcataaacaaagaaaccgaagcggcggcagagccgcacaggatcggtaaagagagagaagagggatgaaaatatatatatatatatatatatatatatatatatatatatatatatatatatatatatataggttaagtctcttttcttaaatttgataaaattttggtataatgcatttttctttgttctctgggtgcatacttgactgtggtggaattgatgtcatcattttcatgtcgtgtacttagagatcaatgtgaaatgttgttgaaattttatcaaatctaagaaaagagacttaac

SEQ ID NO: 15541 - DNA, 1037 bp, Glycine max
  Gm_smallRNAprecursor_8374
ttagtggggcagacacttaacaccttccttgcttggtcaacacatcttgtgaagcgtttatcagaacatgtattttactctgattatatgtttatttttttcaattaatttgttcactgtaatcaaaatttgctaattaactatgttttatcaacaggcaactgtgtctccagcaaaacctccaaaaagcccggatgaagaggttgatgatcccctgtacctgatgacattgaccatcccacaactgtttttgaagccgctccaggttatgtgggatgctaccatattcagggtgtttaatcaaaacttcccattgtatataaagcatgaagatctctctgaaattgcacacggtggtcaatgtcttagcatatctgttatacagttgtggattctgtaagtcattttagattactattaattaccaaagtaattgttttaaattcatacataattaactttaacttaacaacacagccatctgactgagacaagtgtgcgagcggggaattctgatgtgtatggactcctcgagccacagtccattcagagatctgggcaatcacaatttgaatccgaaagttacatcaagagttggatacagagttcaaaacgagatatttaccttggagcctacctgaatgggtaagtcaaacacaataattgaatttaaataatctatactactacaataactcatattcgtctctactgcagcggacactggcaaatggtcgtcattctgcctaaggaaaacctagttgtctggttttgttctttacataacaggccagacaactaccttaagggaataattaacaggtcaatattgttttcaatacattttcattggcataactcaacaacatcaatattttaatgttcctcatattcaacactactgctttgaaaggacttaatgatacttcacaaccgaaatccaaggctgctgctaggtggattgttgttaaggtacgtgatttaaataaaagttctacttatatatattttatgtgtgtgtacactaattgtagtta

SEQ ID NO: 15542 - DNA, 1089 bp, Glycine max
  Gm_smallRNAprecursor_8375
tttacccatgtcctctatcaagtcatgtagtgtaacatagccattcaaactaatctttatgagagatttttcaaccaacactccaatatgatgtttcatgcaatggccatgatgagcatgaagtatatcttggatctctgccaaatcatattttttgaagcaacaagcaatgtcaagaaaaacactttgctcatcttcttccaaagcatcataactcactttaagtatctcttggatctctttattagggattcttttgtatcgatctaaagcagatatccattgttctatattttttccggataagttggaacctattacttctaaagccaatggaaggcccgaagcataagttgctgctcgattcaaaacatccttgtaaaatggatcaacttttcccaacttgaaagctttccaattaagtaactcaagagcatattcctcattcaattcattcacctcatatgttctttcaacaccgtgacatgctagcaattgtttgtcccgagtcgtgatgatgactctactgccaggaccaaacaaatcaggtcttccagcaagcgcctgtagctgttcccttttgtcaacatcatctagaatcaaaagaaccttcttttgccggagcctatgctctattatggaaattccttgtttgacacctattaacttatcctctccggccgtttcagaaagaaggtttctttgtagatgttgtaacccatgtttctttgaagtttctctcacgttttgaaggaaacacaaagcttcaaaatggtcagcaatggaattataaactgcagcagcaagtgtcgttttacctactccaccgagcccatgtatacccagcatgtggacaacatcatcagatccaacatccagaagcgcttttacttcttgtattcgtgactctagtccaactggataatccgcaacatgtaaaggagcacgatcaatcttcttagagaccaactcaacaatcctctgaataaattcatattcgtattcttccctattcaataagagaaatttatgagaagtcaaacaaaacatgtcatctccatatcttgatatgtatgtatgttgttgaag

SEQ ID NO: 15543 - DNA, 1187 bp, Glycine max
  Gm_smallRNAprecursor_8376
ggtagaatgacgaccatttgccagtgtccactgtagtagagacgaatatgggttattgtagtagtatagattatttaaattcaattattgtgtttgacttacctattcagataggctccaaggtaaacatctcgttttgaactctgtatccaactcttgatgtaactttcgaattcaaattgtgattgcccagatctctgaatggactgtggctcgaggaatccatacacatcagaattccccgctcgcacacttgtctcagtcagatggctgtgttgttaagtcaaagttaattatgtatgaatttaaaacaattactttggtaattaatagtaatctaaaatgacttacagaatccacaattgtataacagatatgctgagacattgaccaccatgtgcaatttcagagagatcttcgtgctttatatacaacgggaagttttgattaaacaccccgaatatggtagcatcgcacataacctggagcggcttcaaaaacagttgtgggatggtcaatgtcatcaggtacaggggatcatcgacctcttcatccgggctttctagaggttttgctggagacacagctgcctattgataaaacatagttaattagcaagttttgattacagtgaacaaattaattgaaaaaaataaacatataatcagagtaaaatacctgttctgataaacgcttcacaagatgtgttggccaagcaaggaaagtgttaagtgtctgccccactaaggtaacctcgtcagtgggtacaggaacgagagcctctgtatctttaatctcctcaacaccaaccttgacttggccatgcaacaaagggatgttgtgaactgttgtggatccctcgtaaagtcttcctagggcaaccaagcgggaaggattttcttcaatatataggccgcatttgtctgagtcacccgtccctggatcgttccctgagggagcaacacaactctcctttgtgctgacacgaggacctgagggaccaacctctggctctggaggtagtgcaattccctgtgattgcatctgagattgaaactgggactgcatctgactgaaggattccatcatctttcgagtcactttttctgtgattgactcctccagtgggtctctgatttgttgggtcaggtgttctaggtcttcaagaggcatggaggaagaactgc

SEQ ID NO: 15544 - DNA, 1116 bp, Glycine max
  Gm_smallRNAprecursor_8377
ttcataacccccacgagacaatacgtggggggcagtgttttgcttctgggaggcctgtgcctttttccgtacatcctacaaaaggataacattaatgaaaatgattattacaataaattataagaagtgattttgttgtggaaaacaactaaaatgacaaagtacatacctcccatgaggggtctctgcgggtctgacaaaactgagtccatttctccttgctaatgccatatttttcacagacaatgtcgtccgcactgtccttgtcgactgcaagtgcccatttcctagtcaagtcagatttaaactacctccagcgctcgccgacaatctgaagaattttcttctttgtcctactgtcagaagcttcagggatttgaaattccgcctgacaaacaataaattaggttttattgtaagtaaataacaaatttagactattaaagaaaatcaacgaagaaaactcaaatacctgaatatcctcccatatcaaatccttctgagcagtagggacttccttccaggtgtcatatgtcacgttgaccttatcacgagcgacaatccccaaatatgttcttaatttcttcttgtggggaccgtcggccttgccggtagcaggatcgacgttgaccacaggtctttctgccccaggtggtctagtggccaatgatcgtagccgtgtcgccttgcgtgtccacttcaacgtagatggagacgcatcagcgtctgcaggaggaggaggaagaggaggaggaggcgaggcaggtggagtagccatggtcctttaaagagaaaaagttgagttagttaatattatcaaaaaacactgtatgagttatgtaaatgaatgtaccgaaatgaaatattatattagaaaattacgttagacgatgttaattaattctccttcatcatgatcattacgattaacatgaacgtcgtcagcttcttcttctccgacattgttagaagtcatttgtgtagacaaaggactaacataagtgtccatgtatgaatcatcatcttctacattaacaccaattgttttcccgtttagaaccacagaccacctttcatcacaagggtcttgcacataaaatacttgcttagcttgtt

SEQ ID NO: 15545 - DNA, 1164 bp, Glycine max
  Gm_smallRNAprecursor_8378
ttgatatgtatattgcctactttcgaaaacgggcctcgacgggtgcagagaaactggaaccagagaagtggcacgcaaaccgaggcaggatttcagcatccaaaaggtcaaattttcctctccttgtggttgggtatgaagtcacatcaagagaaaaaggtgggcccctttttgctccatttcaaatgggacaagtggcattgctttatgaaaaaaaaaagaaaagaaaatcttttttttataaaagccaaatttctctctccttctttagaaatttcagcagctcttcttctcccttccacgtagctttttctttttcctttctcctccaccattgttgccctttgaagctccaaaattcctccacatttctactccaaatcgcaaggagaagccattttcggagtcttgaagcacacctctacgttgtgggactttgaatttcaggtatgggtggacttcttctcacatgaaattcgtgggtattgggtttttgggagatatgatgggtagttctactaggttattgccttagggtagttatttgtgaaggaatttgttgaaatcatgctaaacttgacatgtttgatgtgagtaaagctacccattctgttttagggttttatgatgatgctttgtgatatttgtatgctgaaattgttggtagaaaactggtagagatgatggggagagttaacttagggttaaatgtgagaatggtagtgatatgagtggaaaagtgtgagattttgagggtttgaaaagccaaatttggggttagtggaaattggagtctaaagtgagttgatcctagtttagaatgtcaattaggacttgtaggaaagcttgggtagagcaaatgagaaaaaggaatgacaagtgtgaaagaaaagagccatttctagggtaaattgggtgttgaggggccaaattttgaaggctggggttttcaccttaaaaccagtttgagcaagtctaaatcaatgttatagacttgattgaaatgagagtttaccccaaaattatccaattctcattttcacttcttaaaccttgaaaatccactaaattgatgggttttggatacctagattttgatttaccttgatctgaagcttgtccttggtttaaatatgatttatacatgatttaggacttgtagga

SEQ ID NO: 15546 - DNA, 1040 bp, Glycine max
  Gm_smallRNAprecursor_8379
agttgagaatgttggaatcaacaaagtgctcattgatggaggagcggctgtcaatttaatgcctcgatctatgctctacaagatcgggaaacgtgacactgatctatctgcccacaacattgtgctttcgaattatgaaggtaaaactggctattctttgggagccattcaagtagatgttgctgtaggcagtatagttcgaccaactctattcctggtgattcagtccaaggctaattttaacttgctattaggaagagaatggattcatggagttggggctgtgccatctacccttcaccagaaactcattatctggagggaagatgggattgttgaaaatatagaggcggatcaaagcttctataagtcggaggtcgataatgttactgcacaaacctttgacaaaaagttggctaacatagcaccttgtggtgacaaggaggctgttgtcgaattaggtgacaatgttatccactctgtcaaactccatccgacctatgggtttatatgggagagggaggaaatcgatgctgttccctctgaagatggagtcattccaccaactgggtggaatatgtatgaagattaatatgactgaggccactgcatgggccagaattacggcttatatggccgaaaatagactaaatacggcctttgaggctgagtctcaacaaaatatggcagtcgaagccaaaatcgaagatcatgaaaacaaagaaacaaaggatcgaagactggattgcatttatgatgatgagccgctgggttttgagaaaaatcccataaataaggtgccaaagatgcaggctcaagatcctttggaggagatcgacattggagatggctcgatgaaaaggccaacatatatcagtgccaatatcacctcaagtctaaaagaaaagttggtgcctcttcttagagaatttaaagactgttttgcttgggattaccacgaaatgcctgggttaagcagagaaatggtcgaaatgaaattaccgattaaggagggaaaaagaccagtaaaacaactacca

SEQ ID NO: 15547 - DNA, 1157 bp, Glycine max
  Gm_smallRNAprecursor_8380
aagaccagtaaaacaactaccaagaagatttgcaccagaaatcatgtccaaaattaaggaagagatcgaaaggctgctgaggtgtaaattcatcagatctgccaggtatgtcgaatggttagcaaatatagtccctgtcattaaaaagaatggaactcttagagtatgcatagattttagggatttaaataatgctacacctaaagatgaatatgctatgccagtagcagaaatgttggtagattcggcagctggcttcgaatttttaagcatgttagatggttattctggttataaccaaatatttattgctgaaagtgatgtgtcgaaaacagcatttcgatgccctggtgctttaggcacttatgaatgggtggttatgccctttgggttgaaaaatgctggggccacttatcaaagggccatgaattccatgtttcatgattttattgacacatttatgcaaatttatattgatgatataatcatcaaatcctcctcagaagatagccatttggattaccttaggcaatctttcgaacgaatgaggaaacatggattaaaaatgaatccattaaaatgtgctttttgtgtacgtgcaggagatttccttggttttgtggtgcataaaaaaggcattgagataaatcaaaataagacaaaggctattcttgagacgaagcctccttcgaccaaaaaacaacttcagtctttgctaggaaaaatcaacttcttaaggcgattcatttcgaatctaagtggcaaagctcaaattttttcgccattacttcgactcaagaaagatgaaccattcaaatggaatgaagagcatcaaaaggctttcgatgaaattaaagaatatctgatcaagcctcctgtgttaatgcctcctagtcgaaacaagtctatgaagttgtatattgctgcatctgacaagaccattggtagcatgttggctcaggaagatgatgatggcatagaacatgcaatttattatcttagtcgtgtactaaatgatgcagaaactagatatactgccatagaaaaactctgtctttgtctatatttctcttgtgcaaaacttaagcaatatataaagcctgttgatgtttatgtgttttctcattatgatattattaagcacatgttgtcaaaac

SEQ ID NO: 15548 - DNA, 1114 bp, Glycine max
  Gm_smallRNAprecursor_8381
aatctaagtggcaaagctcaaattttttcgccattacttcgactcaagaaagatgaaccattcaaatggaatgaagagcatcaaaaggctttcgatgaaattaaagaatatctgatcaagcctcctgtgttaatgcctcctagtcgaaacaagtctatgaagttgtatattgctgcatctgacaagaccattggtagcatgttggctcaggaagatgatgatggcatagaacatgcaatttattatcttagtcgtgtactaaatgatgcagaaactagatatactgccatagaaaaactctgtctttgtctatatttctcttgtgcaaaacttaagcaatatataaagcctgttgatgtttatgtgttttctcattatgatattattaagcacatgttgtcaaaacctattttacacagtagaattggaaaatgggctttagcattaacagaatattctttaacgtacaagcctttgaaatctgttaagggtcaaattgtggcagattttattgtagatcactcagtggtcgaaatgccgcaagactatgtagatacagagccttggattttgtatttcgatggttcgaaacacaaacatggaactggaattggagttttaataatatcccccaataaagttccaactaaatttaaatataaaatcaaagggctttgttctaataatgaggctgagtatgaggctttaattacaggccttgaaattttaattagcctgggggcaagaaatgttaacataaggggtgattcagaattagtagtgaagcaattaacacaagaatacaaatgtgttaatgaacaattagcaaaatattttgttatggccagttctcttctgaatcatttcgattacattaacattgagcatatacctcgactagaaaaccaagaagcaaatgatttagcccaaatagcttcagggtacaaaatgtcgaaggaaaaactaactcagttgatcgagataaaagataaactggtgttaccagagccattaagcactaaattgccaatgccaaaacttgtgggggcaagtacaccacaaaataatgaagatgaaagcatgaatgatctccaggaaaaaattcaaattttgg

SEQ ID NO: 15549 - DNA, 1082 bp, Glycine max
  Gm_smallRNAprecursor_8382
cagtggtcgaaatgccgcaagactatgtagatacagagccttggattttgtatttcgatggttcgaaacacaaacatggaactggaattggagttttaataatatcccccaataaagttccaactaaatttaaatataaaatcaaagggctttgttctaataatgaggctgagtatgaggctttaattacaggccttgaaattttaattagcctgggggcaagaaatgttaacataaggggtgattcagaattagtagtgaagcaattaacacaagaatacaaatgtgttaatgaacaattagcaaaatattttgttatggccagttctcttctgaatcatttcgattacattaacattgagcatatacctcgactagaaaaccaagaagcaaatgatttagcccaaatagcttcagggtacaaaatgtcgaaggaaaaactaactcagttgatcgagataaaagataaactggtgttaccagagccattaagcactaaattgccaatgccaaaacttgtgggggcaagtacaccacaaaataatgaagatgaaagcatgaatgatctccaggaaaaaattcaaattttggccattgacaatatgttacataatgattggagaaagtccattatcgaatatttggaaaatccaattggcaatgtggctcgaaagatcaaatatagggctttaaattacgtaattgtgggaaatgatttgtttaaaaagactgcagaaggagtattgctgaaatgtctgagtgaatcagaggcatacttggcaatttcccatgttcacagtggggcctgtggatcgcatcaagcaggccataaaatgaaatggcttttatttcgacaaggcttgtattggccttcgatgttaaaagactgcatagaatttgctaaaggctgtcaggaatgccaaaagcatgcaggaatacagcatgtacctgctagtgagttacactccataatcaaaccttggcctttcagaggatgggctttggacctaattggtgaaatcaagcctgcctcttcgaagaaccagcgttatattatagttggtatcgattactttacaaaa

SEQ ID NO: 15550 - DNA, 1086 bp, Glycine max
  Gm_smallRNAprecursor_8383
gtttctgaatcgagttagcggcctgctcctggagttctttgcgtttggcctgctctgttataattttctgccttagatcatcgacctgagacagcaagttcgtaatagttgcttcccaggaggagatgttatcatcacaggctttaagctcagaagatccttctttcgcctctttggtaagacgttcgacttcacgttgagcagcttgggctttttcgagcagaaggatatgtgcctgtttctgggcatccagtctggcgctattttcgcgttttttctgcacggtacttgcaaactggtcgatgatggcctcgatttggatgactttgcctagaatctcatcagaggtaagggggttgtgcaatttcttcaaaaaattcaggtgtccaaaagcagcagaggggttctcttcaatggatttaagtacgtctgcccgtgcgtattccattgataacttcaaaagcaggcaatcttggcgtactgaagaggttatgtcagcatcagatgaggacgaagcaccaggaatcttttcacttgaggtgttggcttgactggtgttcagcaggagtcgaagggctgcagcagggtcttcgtcttgcatttgaatgaatgtatcctctgcgatccctatgctagcggaaagcttagatgtcgaagacgccgggaaaatgtctgaacctccagcttcagcctcttgtatggcctcttcatcggaaaagtgttcttcagatgaacttttctgactcgatccatgaggactgctgggtccaatgccttgaccttcaccctgttcctcaacattcactgcatccgtctcaggagcggaagatgttcgagcatgtgagggtatttcttctatagaaacatcttgttgtacctgattcgaattgtcatggaaaaggttaacaaatagtttcgtattagctatgattaaaatcacattaagaatgatacctcgacggtaggttgttcttgtggtaagttcggttgctcgacagggttgcccatttcagcaatagagggagtagcctctgcttcagtgccgtcaacatcagtcgaaggtggttggacgtcaacgggttgatt

SEQ ID NO: 15551 - DNA, 1069 bp, Glycine max
  Gm_smallRNAprecursor_8384
cttaattcattcttaccaattaaataaccatttttcaattacaaaatttaatgtgactcaagttaaacacccactctaacaaacttaattcattcttaccaattaaataaccatttttcaattactgaaataaatttttatgtaaagtttttaaatctatttgatattgtaggactcataaattttagataaacaattcatttaagtaatcatgcattgtagatactcttaatgtaacaaattttcaattttgtctctatatgcaaaccctaattattaattcagtttctatacatgcaaatgtttccaatttggtctcatgatgccgtctataatggtcctacattgactgttagaatctgtttgtatacaaagctagaagtccttttgagagcttctctattgaaaaaaactttatatttttagtagagaagctctgaaaaacatttattgcttgtattcaaacaggcctttaattcctttctatgaagcaccgacaccgacatggacaccggacacgacacggacatgaacatgtgaatacctgtaatgtccaaaatatagaacgtagtacgggtgtcgtgtcggtgtcggacactgacacggacgcatgtcggacaccagacacggcaaggggctggagtgtccgtgcttcatagatttactttggcttcttaatctggtacttgtatatgtagcgcattcttaatatagtgcctacacaggtaagaatgtgctacatgtacaacaacaacaacaacaacaacgccttatcccactaggtggggtcggctacatggatcaacttccgccataatgttctatcaagtaccatacttctatccaaatcattaagttcgagatccttcttgataacctctcttatagtctttttgggtcttcctctgcctcgaattgtttgccttctctccatctggtctactctcctcactacagagtctaccagtcttctctctacatgcccaaaccacctaagtctattttccactatcttctctacaataggcgctactccaaccctctctctaatagctccgtttctaatttt

SEQ ID NO: 15552 - DNA, 1069 bp, Glycine max; identical to SEQ ID NO: 15551
  Gm_smallRNAprecursor_8385

SEQ ID NO: 15553 - DNA, 1071 bp, Glycine max
  Gm_smallRNAprecursor_8386
cttaattcattcttaccaattaaataaccatttttcaattacaaaatttaatgtgactcaagttaaacacccactctaacaaacttaattcattcttaccaattaaataaccatttttcaattactgaaataaatttttatgtaaagtttttaaatctatttgatattgtaggactcataaattttagataaacaattcatttaagtaatcatgcattgtagatactcttaatgtaacaaattttcaattttgtctctatatgcaaaccctaattattaattcagtttctatacatgcaaatgtttccaatttggtctcatgatgccgtctataatggtcctacattgactgttagaatctgtttgtatacaaagctagaagtccttttgagagcttctctattgaaaaaaactttatatttttagtagagaagctctgaaaaacatttattgcttgtattcaaacaggcctttaattcctttctatgaagcaccgacaccgacatggacaccggacacgacacggacatgaacatgtgaatacctgtaatgtccaaaatatagaacgtagtacgggtgtcgtgtcggtgtcggacactgacacggacgcatgtcggacaccagacacggcaaggggctggagtgtccgtgcttcatagatttactttggcttcttaatctggtacttgtatatgtagcgcattcttaatatagtgcctacacaggtaagaatgtgctacatgtacaacaacaacaacaacaacaacgccttatcccactaggtggggtcggctacatggatcaacttccgccataatgttctatcaagtaccatacttctatccaaatcattaagttcgagatccttcttgataacctctcttatagtctttttgggtcttcctctgcctcgaattgtttgccttctctccatctggtctactctcctcactacagagtctaccagtcttctctctacatgcccaaaccacctaagtctattttccactatcttctctacaataggcgctactccaaccctctctctaatagctccgtttctaattttat

SEQ ID NO: 15554 - DNA, 1076 bp, Glycine max
  Gm_smallRNAprecursor_8387
cttaattcattcttaccaattaaataaccatttttcaattacaaaatttaatgtgactcaagttaaacacccactctaacaaacttaattcattcttaccaattaaataaccatttttcaattactgaaataaatttttatgtaaagtttttaaatctatttgatattgtaggactcataaattttagataaacaattcatttaagtaatcatgcattgtagatactcttaatgtaacaaattttcaattttgtctctatatgcaaaccctaattattaattcagtttctatacatgcaaatgtttccaatttggtctcatgatgccgtctataatggtcctacattgactgttagaatctgtttgtatacaaagctagaagtccttttgagagcttctctattgaaaaaaactttatatttttagtagagaagctctgaaaaacatttattgcttgtattcaaacaggcctttaattcctttctatgaagcaccgacaccgacatggacaccggacacgacacggacatgaacatgtgaatacctgtaatgtccaaaatatagaacgtagtacgggtgtcgtgtcggtgtcggacactgacacggacgcatgtcggacaccagacacggcaaggggctggagtgtccgtgcttcatagatttactttggcttcttaatctggtacttgtatatgtagcgcattcttaatatagtgcctacacaggtaagaatgtgctacatgtacaacaacaacaacaacaacaacgccttatcccactaggtggggtcggctacatggatcaacttccgccataatgttctatcaagtaccatacttctatccaaatcattaagttcgagatccttcttgataacctctcttatagtctttttgggtcttcctctgcctcgaattgtttgccttctctccatctggtctactctcctcactacagagtctaccagtcttctctctacatgcccaaaccacctaagtctattttccactatcttctctacaataggcgctactccaaccctctctctaatagctccgtttctaattttatcatgt

SEQ ID NO: 15555 - DNA, 1076 bp, Glycine max; identical to SEQ ID NO: 15554
  Gm_smallRNAprecursor_8388

SEQ ID NO: 15556 - DNA, 1077 bp, Glycine max
  Gm_smallRNAprecursor_8389
cttaattcattcttaccaattaaataaccatttttcaattacaaaatttaatgtgactcaagttaaacacccactctaacaaacttaattcattcttaccaattaaataaccatttttcaattactgaaataaatttttatgtaaagtttttaaatctatttgatattgtaggactcataaattttagataaacaattcatttaagtaatcatgcattgtagatactcttaatgtaacaaattttcaattttgtctctatatgcaaaccctaattattaattcagtttctatacatgcaaatgtttccaatttggtctcatgatgccgtctataatggtcctacattgactgttagaatctgtttgtatacaaagctagaagtccttttgagagcttctctattgaaaaaaactttatatttttagtagagaagctctgaaaaacatttattgcttgtattcaaacaggcctttaattcctttctatgaagcaccgacaccgacatggacaccggacacgacacggacatgaacatgtgaatacctgtaatgtccaaaatatagaacgtagtacgggtgtcgtgtcggtgtcggacactgacacggacgcatgtcggacaccagacacggcaaggggctggagtgtccgtgcttcatagatttactttggcttcttaatctggtacttgtatatgtagcgcattcttaatatagtgcctacacaggtaagaatgtgctacatgtacaacaacaacaacaacaacaacgccttatcccactaggtggggtcggctacatggatcaacttccgccataatgttctatcaagtaccatacttctatccaaatcattaagttcgagatccttcttgataacctctcttatagtctttttgggtcttcctctgcctcgaattgtttgccttctctccatctggtctactctcctcactacagagtctaccagtcttctctctacatgcccaaaccacctaagtctattttccactatcttctctacaataggcgctactccaaccctctctctaatagctccgtttctaattttatcatgtc

SEQ ID NO: 15557 - DNA, 1078 bp, Glycine max
  Gm_smallRNAprecursor_8390
cttaattcattcttaccaattaaataaccatttttcaattacaaaatttaatgtgactcaagttaaacacccactctaacaaacttaattcattcttaccaattaaataaccatttttcaattactgaaataaatttttatgtaaagtttttaaatctatttgatattgtaggactcataaattttagataaacaattcatttaagtaatcatgcattgtagatactcttaatgtaacaaattttcaattttgtctctatatgcaaaccctaattattaattcagtttctatacatgcaaatgtttccaatttggtctcatgatgccgtctataatggtcctacattgactgttagaatctgtttgtatacaaagctagaagtccttttgagagcttctctattgaaaaaaactttatatttttagtagagaagctctgaaaaacatttattgcttgtattcaaacaggcctttaattcctttctatgaagcaccgacaccgacatggacaccggacacgacacggacatgaacatgtgaatacctgtaatgtccaaaatatagaacgtagtacgggtgtcgtgtcggtgtcggacactgacacggacgcatgtcggacaccagacacggcaaggggctggagtgtccgtgcttcatagatttactttggcttcttaatctggtacttgtatatgtagcgcattcttaatatagtgcctacacaggtaagaatgtgctacatgtacaacaacaacaacaacaacaacgccttatcccactaggtggggtcggctacatggatcaacttccgccataatgttctatcaagtaccatacttctatccaaatcattaagttcgagatccttcttgataacctctcttatagtctttttgggtcttcctctgcctcgaattgtttgccttctctccatctggtctactctcctcactacagagtctaccagtcttctctctacatgcccaaaccacctaagtctattttccactatcttctctacaataggcgctactccaaccctctctctaatagctccgtttctaattttatcatgtcg

SEQ ID NO: 15558 - DNA, 1038 bp, Glycine max
  Gm_smallRNAprecursor_8391
aacaaacttaattcattcttaccaattaaataaccatttttcaattactgaaataaatttttatgtaaagtttttaaatctatttgatattgtaggactcataaattttagataaacaattcatttaagtaatcatgcattgtagatactcttaatgtaacaaattttcaattttgtctctatatgcaaaccctaattattaattcagtttctatacatgcaaatgtttccaatttggtctcatgatgccgtctataatggtcctacattgactgttagaatctgtttgtatacaaagctagaagtccttttgagagcttctctattgaaaaaaactttatatttttagtagagaagctctgaaaaacatttattgcttgtattcaaacaggcctttaattcctttctatgaagcaccgacaccgacatggacaccggacacgacacggacatgaacatgtgaatacctgtaatgtccaaaatatagaacgtagtacgggtgtcgtgtcggtgtcggacactgacacggacgcatgtcggacaccagacacggcaaggggctggagtgtccgtgcttcatagatttactttggcttcttaatctggtacttgtatatgtagcgcattcttaatatagtgcctacacaggtaagaatgtgctacatgtacaacaacaacaacaacaacaacgccttatcccactaggtggggtcggctacatggatcaacttccgccataatgttctatcaagtaccatacttctatccaaatcattaagttcgagatccttcttgataacctctcttatagtctttttgggtcttcctctgcctcgaattgtttgccttctctccatctggtctactctcctcactacagagtctaccagtcttctctctacatgcccaaaccacctaagtctattttccactatcttctctacaataggcgctactccaaccctctctctaatagctccgtttctaattttatcatgtcgagtcttaccacacatccaccgcaacatcctcatctcc

SEQ ID NO: 15559 - DNA, 1036 bp, Glycine max
  Gm_smallRNAprecursor_8392
acaaacttaattcattcttaccaattaaataaccatttttcaattactgaaataaatttttatgtaaagtttttaaatctatttgatattgtaggactcataaattttagataaacaattcatttaagtaatcatgcattgtagatactcttaatgtaacaaattttcaattttgtctctatatgcaaaccctaattattaattcagtttctatacatgcaaatgtttccaatttggtctcatgatgccgtctataatggtcctacattgactgttagaatctgtttgtatacaaagctagaagtccttttgagagcttctctattgaaaaaaactttatatttttagtagagaagctctgaaaaacatttattgcttgtattcaaacaggcctttaattcctttctatgaagcaccgacaccgacatggacaccggacacgacacggacatgaacatgtgaatacctgtaatgtccaaaatatagaacgtagtacgggtgtcgtgtcggtgtcggacactgacacggacgcatgtcggacaccagacacggcaaggggctggagtgtccgtgcttcatagatttactttggcttcttaatctggtacttgtatatgtagcgcattcttaatatagtgcctacacaggtaagaatgtgctacatgtacaacaacaacaacaacaacaacgccttatcccactaggtggggtcggctacatggatcaacttccgccataatgttctatcaagtaccatacttctatccaaatcattaagttcgagatccttcttgataacctctcttatagtctttttgggtcttcctctgcctcgaattgtttgccttctctccatctggtctactctcctcactacagagtctaccagtcttctctctacatgcccaaaccacctaagtctattttccactatcttctctacaataggcgctactccaaccctctctctaatagctccgtttctaattttatcatgtcgagtcttaccacacatccaccgcaacatcctcatctc

SEQ ID NO: 15560 - DNA, 1037 bp, Glycine max
  Gm_smallRNAprecursor_8393
acaaacttaattcattcttaccaattaaataaccatttttcaattactgaaataaatttttatgtaaagtttttaaatctatttgatattgtaggactcataaattttagataaacaattcatttaagtaatcatgcattgtagatactcttaatgtaacaaattttcaattttgtctctatatgcaaaccctaattattaattcagtttctatacatgcaaatgtttccaatttggtctcatgatgccgtctataatggtcctacattgactgttagaatctgtttgtatacaaagctagaagtccttttgagagcttctctattgaaaaaaactttatatttttagtagagaagctctgaaaaacatttattgcttgtattcaaacaggcctttaattcctttctatgaagcaccgacaccgacatggacaccggacacgacacggacatgaacatgtgaatacctgtaatgtccaaaatatagaacgtagtacgggtgtcgtgtcggtgtcggacactgacacggacgcatgtcggacaccagacacggcaaggggctggagtgtccgtgcttcatagatttactttggcttcttaatctggtacttgtatatgtagcgcattcttaatatagtgcctacacaggtaagaatgtgctacatgtacaacaacaacaacaacaacaacgccttatcccactaggtggggtcggctacatggatcaacttccgccataatgttctatcaagtaccatacttctatccaaatcattaagttcgagatccttcttgataacctctcttatagtctttttgggtcttcctctgcctcgaattgtttgccttctctccatctggtctactctcctcactacagagtctaccagtcttctctctacatgcccaaaccacctaagtctattttccactatcttctctacaataggcgctactccaaccctctctctaatagctccgtttctaattttatcatgtcgagtcttaccacacatccaccgcaacatcctcatctcc

SEQ ID NO: 15561 - DNA, 1042 bp, Glycine max
  Gm_smallRNAprecursor_8394
aattatgtttgtctttaactgtctcaggaacatataatgtgtcttgagggatttctaaaatacttcagtcatccatattttggtttatttcttcgaatcggacctcctcattgaagagattgtgttttggggcgacctcgtgggtctggtttccttgctcattgagcaaatttaagtgtcttaaggaactatttgaagatgatcaagatgaactagagagaaaggaaatgcgggagaaagaacgtaaaagacgagacatgatattcatcttacagtatctttgccttcatgtggctccatagaaatgtttccataaggttatatgttactaagtttcttggatctgaaaaaataaaatttttaactttttttttttgaaaacaaacaatatagtttgaacattactcctatagccaccaatatattatgtcttaatattttatttgaagaatacaccttagccttactgccctttttcatccacaggacttactgctacaatatcattcaactaaaatatcagactgttgtacttccagaaatactgttcaaacacatactgtttaaattaagagtattgtacatgaatgaaaacggttactatacataagttcaaatccatgaaatccgttaacatatatccttacggacaatattcctacttccccatcaagctctgataccagagatcagctaacatatatgttttggtattatacattttgttaaactgagaaaacccatgttgaacttgctccgagtatatttcaaaggttggtccaaaaaagtcccaccactggaataaccaatttggaaaattgtagactgtattggttttaaaataaattaaccaggagtgtttaaatttgctattttgatgccataaaacattggtccaggcatctacgtaatcccaataggtgtaacctataggatcaaacggtgtagagaattttttgggttgattcaaatttgttccaaactgtctaggttgtaagacctttaaaatttggatagttgaatgggtattcaaacttgggtc

SEQ ID NO: 15562 - DNA, 1046 bp, Glycine max
  Gm_smallRNAprecursor_8395
tatcttgctacctaaacatacatacatatatatatatatatatatatatatatatatatatatatatatatatgaccatggtagtttggagggtgttttcccaggtttttgaaaacaaagaaatcgaagcggcggcagagccgcacaggatcggtggagggagaagagagaaggatgaaaaatagaaatttattgaatctagaaagaagcgcttacaaaaatcttgtttcagagcacctctcttccgaaacctgaaaaaatggctaaatgaaagggtgcctcacaacatacttgaggactccttatatagccaaaaatctaagaccggtagttgccggtagttttgaccgggactatttgactgtttgttacaagacaagtagttttgaccgggactttaatggctacaggacaggtagtattgtccagtattaattacacattaattacagacagacggttttgtgaccgaaattaaatttaatctaaacagataccaaaacaatcatcttcgttttggtaaaagggatcttcttcgtcttcttcagcagaacttgtttcttccttctttgaggatgaagcttcttcttcctgttgtaacatttgtagaacttccttcagatttttagctaagacctcctttgatgtcgatcctgctaaaaatgctgccagatgagacttttggttcaaaaacacagaagtctctagatcagctgctttgaggaattctggatgggattggaaccatagttttacttggtctggatccgctttggatgagtcaaattgtgtccaccattttacaaatgcgtgtctttgtagtgatggatattggtttgtcttttcagtcttcctgtaacgatattgccatgagaatatccatgacagtgcaaagcttgaaaagtatttaagatctgctggaattcgtgattcctgcgaattgtattgtttcttaaattgggaaaatccttgttggaccgtttctgggaatatctctgggattggtccaaagaagtcccaccattgcaaaaaccagttgggaaaat

SEQ ID NO: 15563 - DNA, 1182 bp, Glycine max
  Gm_smallRNAprecursor_8396
tgtttcagagcacctctcttccgaaacctgaaaaaatggctaaatgaaagggtgcctcacaacatacttgaggactccttatatagccaaaaatctaagaccggtagttgccggtagttttgaccgggactatttgactgtttgttacaagacaagtagttttgaccgggactttaatggctacaggacaggtagtattgtccagtattaattacacattaattacagacagacggttttgtgaccgaaattaaatttaatctaaacagataccaaaacaatcatcttcgttttggtaaaagggatcttcttcgtcttcttcagcagaacttgtttcttccttctttgaggatgaagcttcttcttcctgttgtaacatttgtagaacttccttcagatttttagctaagacctcctttgatgtcgatcctgctaaaaatgctgccagatgagacttttggttcaaaaacacagaagtctctagatcagctgctttgaggaattctggatgggattggaaccatagttttacttggtctggatccgctttggatgagtcaaattgtgtccaccattttacaaatgcgtgtctttgtagtgatggatattggtttgtcttttcagtcttcctgtaacgatattgccatgagaatatccatgacagtgcaaagcttgaaaagtatttaagatctgctggaattcgtgattcctgcgaattgtattgtttcttaaattgggaaaatccttgttggaccgtttctgggaatatctctgggattggtccaaagaagtcccaccattgcaaaaaccagttgggaaaattgtagattgtgttggtcttgaaatatatcagccatgaatgcttgaagcgggtattttggtgccaaaacaccttagtccaagcatcaacgtaatcccaataagtataacctaccggatcaaatggaactgaaaatctctttcctttgttcaagtccgaaccaaagtgtcttggttgaagaacttttagtatttggatggttgagtgggtgtttaaggtttggtcttttggatctttgaaatgtttgatagatactgagtttgaatctaccaaaatcaattcataaaaagttcttgtcttcaggatggtggttggtttatagtgaaatcctggtgggaaagccttggccgtcgccttgaagg

SEQ ID NO: 15564 - DNA, 1031 bp, Glycine max
  Gm_smallRNAprecursor_8397
acaagtagttttgaccgggactttaatggctacaggacaggtagtattgtccagtattaattacacattaattacagacagacggttttgtgaccgaaattaaatttaatctaaacagataccaaaacaatcatcttcgttttggtaaaagggatcttcttcgtcttcttcagcagaacttgtttcttccttctttgaggatgaagcttcttcttcctgttgtaacatttgtagaacttccttcagatttttagctaagacctcctttgatgtcgatcctgctaaaaatgctgccagatgagacttttggttcaaaaacacagaagtctctagatcagctgctttgaggaattctggatgggattggaaccatagttttacttggtctggatccgctttggatgagtcaaattgtgtccaccattttacaaatgcgtgtctttgtagtgatggatattggtttgtcttttcagtcttcctgtaacgatattgccatgagaatatccatgacagtgcaaagcttgaaaagtatttaagatctgctggaattcgtgattcctgcgaattgtattgtttcttaaattgggaaaatccttgttggaccgtttctgggaatatctctgggattggtccaaagaagtcccaccattgcaaaaaccagttgggaaaattgtagattgtgttggtcttgaaatatatcagccatgaatgcttgaagcgggtattttggtgccaaaacaccttagtccaagcatcaacgtaatcccaataagtataacctaccggatcaaatggaactgaaaatctctttcctttgttcaagtccgaaccaaagtgtcttggttgaagaacttttagtatttggatggttgagtgggtgtttaaggtttggtcttttggatctttgaaatgtttgatagatactgagtttgaatctaccaaaatcaattcataaaaagttcttgtcttcaggatggtggttggtttatagtgaaatcctggtgggaaagccttggccgtcgccttgaagg

SEQ ID NO: 15565 - DNA, 1031 bp, Glycine max; identical to SEQ ID NO: 15564
  Gm_smallRNAprecursor_8398

SEQ ID NO: 15566 - DNA, 1114 bp, Glycine max
  Gm_smallRNAprecursor_8399
ggactttaatggctacaggacaggtagtattgtccagtattaattacacattaattacagacagacggttttgtgaccgaaattaaatttaatctaaacagataccaaaacaatcatcttcgttttggtaaaagggatcttcttcgtcttcttcagcagaacttgtttcttccttctttgaggatgaagcttcttcttcctgttgtaacatttgtagaacttccttcagatttttagctaagacctcctttgatgtcgatcctgctaaaaatgctgccagatgagacttttggttcaaaaacacagaagtctctagatcagctgctttgaggaattctggatgggattggaaccatagttttacttggtctggatccgctttggatgagtcaaattgtgtccaccattttacaaatgcgtgtctttgtagtgatggatattggtttgtcttttcagtcttcctgtaacgatattgccatgagaatatccatgacagtgcaaagcttgaaaagtatttaagatctgctggaattcgtgattcctgcgaattgtattgtttcttaaattgggaaaatccttgttggaccgtttctgggaatatctctgggattggtccaaagaagtcccaccattgcaaaaaccagttgggaaaattgtagattgtgttggtcttgaaatatatcagccatgaatgcttgaagcgggtattttggtgccaaaacaccttagtccaagcatcaacgtaatcccaataagtataacctaccggatcaaatggaactgaaaatctctttcctttgttcaagtccgaaccaaagtgtcttggttgaagaacttttagtatttggatggttgagtgggtgtttaaggtttggtcttttggatctttgaaatgtttgatagatactgagtttgaatctaccaaaatcaattcataaaaagttcttgtcttcaggatggtggttggtttatagtgaaatcctggtgggaaagccttggccgtcgccttgaagggatttttgtcccaaaattcaggttccatctgcaaaatagttaacaatttatttttataaatataattgttagtttgtttggtaggtggtgtttgagcttt

SEQ ID NO: 15567 - DNA, 1147 bp, Glycine max
  Gm_smallRNAprecursor_8400
tacaggacaggtagtattgtccagtattaattacacattaattacagacagacggttttgtgaccgaaattaaatttaatctaaacagataccaaaacaatcatcttcgttttggtaaaagggatcttcttcgtcttcttcagcagaacttgtttcttccttctttgaggatgaagcttcttcttcctgttgtaacatttgtagaacttccttcagatttttagctaagacctcctttgatgtcgatcctgctaaaaatgctgccagatgagacttttggttcaaaaacacagaagtctctagatcagctgctttgaggaattctggatgggattggaaccatagttttacttggtctggatccgctttggatgagtcaaattgtgtccaccattttacaaatgcgtgtctttgtagtgatggatattggtttgtcttttcagtcttcctgtaacgatattgccatgagaatatccatgacagtgcaaagcttgaaaagtatttaagatctgctggaattcgtgattcctgcgaattgtattgtttcttaaattgggaaaatccttgttggaccgtttctgggaatatctctgggattggtccaaagaagtcccaccattgcaaaaaccagttgggaaaattgtagattgtgttggtcttgaaatatatcagccatgaatgcttgaagcgggtattttggtgccaaaacaccttagtccaagcatcaacgtaatcccaataagtataacctaccggatcaaatggaactgaaaatctctttcctttgttcaagtccgaaccaaagtgtcttggttgaagaacttttagtatttggatggttgagtgggtgtttaaggtttggtcttttggatctttgaaatgtttgatagatactgagtttgaatctaccaaaatcaattcataaaaagttcttgtcttcaggatggtggttggtttatagtgaaatcctggtgggaaagccttggccgtcgccttgaagggatttttgtcccaaaattcaggttccatctgcaaaatagttaacaatttatttttataaatataattgttagtttgtttggtaggtggtgtttgagctttggctaaaggtagttttcctttagtattggtggctgttttggtcatt

SEQ ID NO: 15568 - DNA, 1147 bp, Glycine max; identical to SEQ ID NO: 15567
  Gm_smallRNAprecursor_8401

SEQ ID NO: 15569 - DNA, 1247 bp, Glycine max
  Gm_smallRNAprecursor_8402
tacaggacaggtagtattgtccagtattaattacacattaattacagacagacggttttgtgaccgaaattaaatttaatctaaacagataccaaaacaatcatcttcgttttggtaaaagggatcttcttcgtcttcttcagcagaacttgtttcttccttctttgaggatgaagcttcttcttcctgttgtaacatttgtagaacttccttcagatttttagctaagacctcctttgatgtcgatcctgctaaaaatgctgccagatgagacttttggttcaaaaacacagaagtctctagatcagctgctttgaggaattctggatgggattggaaccatagttttacttggtctggatccgctttggatgagtcaaattgtgtccaccattttacaaatgcgtgtctttgtagtgatggatattggtttgtcttttcagtcttcctgtaacgatattgccatgagaatatccatgacagtgcaaagcttgaaaagtatttaagatctgctggaattcgtgattcctgcgaattgtattgtttcttaaattgggaaaatccttgttggaccgtttctgggaatatctctgggattggtccaaagaagtcccaccattgcaaaaaccagttgggaaaattgtagattgtgttggtcttgaaatatatcagccatgaatgcttgaagcgggtattttggtgccaaaacaccttagtccaagcatcaacgtaatcccaataagtataacctaccggatcaaatggaactgaaaatctctttcctttgttcaagtccgaaccaaagtgtcttggttgaagaacttttagtatttggatggttgagtgggtgtttaaggtttggtcttttggatctttgaaatgtttgatagatactgagtttgaatctaccaaaatcaattcataaaaagttcttgtcttcaggatggtggttggtttatagtgaaatcctggtgggaaagccttggccgtcgccttgaagggatttttgtcccaaaattcaggttccatctgcaaaatagttaacaatttatttttataaatataattgttagtttgtttggtaggtggtgtttgagctttggctaaaggtagttttcctttagtattggtggctgttttggtcattgacgcattttggatcattgtttgtaaatttgattcagattcatcatcagattcggaggcaatgtctgcccaagattttttgattatttttggaaatttgg

SEQ ID NO: 15570 - DNA, 1247 bp, Glycine max; identical to SEQ ID NO: 15569
  Gm_smallRNAprecursor_8403

SEQ ID NO: 15571 - DNA, 1072 bp, Glycine max
  Gm_smallRNAprecursor_8404
gcttcttcttcctgttgtaacatttgtagaacttccttcagatttttagctaagacctcctttgatgtcgatcctgctaaaaatgctgccagatgagacttttggttcaaaaacacagaagtctctagatcagctgctttgaggaattctggatgggattggaaccatagttttacttggtctggatccgctttggatgagtcaaattgtgtccaccattttacaaatgcgtgtctttgtagtgatggatattggtttgtcttttcagtcttcctgtaacgatattgccatgagaatatccatgacagtgcaaagcttgaaaagtatttaagatctgctggaattcgtgattcctgcgaattgtattgtttcttaaattgggaaaatccttgttggaccgtttctgggaatatctctgggattggtccaaagaagtcccaccattgcaaaaaccagttgggaaaattgtagattgtgttggtcttgaaatatatcagccatgaatgcttgaagcgggtattttggtgccaaaacaccttagtccaagcatcaacgtaatcccaataagtataacctaccggatcaaatggaactgaaaatctctttcctttgttcaagtccgaaccaaagtgtcttggttgaagaacttttagtatttggatggttgagtgggtgtttaaggtttggtcttttggatctttgaaatgtttgatagatactgagtttgaatctaccaaaatcaattcataaaaagttcttgtcttcaggatggtggttggtttatagtgaaatcctggtgggaaagccttggccgtcgccttgaagggatttttgtcccaaaattcaggttccatctgcaaaatagttaacaatttatttttataaatataattgttagtttgtttggtaggtggtgtttgagctttggctaaaggtagttttcctttagtattggtggctgttttggtcattgacgcattttggatcattgtttgtaaatttgattcagattcatcatcagattcggaggcaatgtctgcccaagattttttgattatttttggaaatttgg

SEQ ID NO: 15572 - DNA, 1124 bp, Glycine max
  Gm_smallRNAprecursor_8405
ccttcagatttttagctaagacctcctttgatgtcgatcctgctaaaaatgctgccagatgagacttttggttcaaaaacacagaagtctctagatcagctgctttgaggaattctggatgggattggaaccatagttttacttggtctggatccgctttggatgagtcaaattgtgtccaccattttacaaatgcgtgtctttgtagtgatggatattggtttgtcttttcagtcttcctgtaacgatattgccatgagaatatccatgacagtgcaaagcttgaaaagtatttaagatctgctggaattcgtgattcctgcgaattgtattgtttcttaaattgggaaaatccttgttggaccgtttctgggaatatctctgggattggtccaaagaagtcccaccattgcaaaaaccagttgggaaaattgtagattgtgttggtcttgaaatatatcagccatgaatgcttgaagcgggtattttggtgccaaaacaccttagtccaagcatcaacgtaatcccaataagtataacctaccggatcaaatggaactgaaaatctctttcctttgttcaagtccgaaccaaagtgtcttggttgaagaacttttagtatttggatggttgagtgggtgtttaaggtttggtcttttggatctttgaaatgtttgatagatactgagtttgaatctaccaaaatcaattcataaaaagttcttgtcttcaggatggtggttggtttatagtgaaatcctggtgggaaagccttggccgtcgccttgaagggatttttgtcccaaaattcaggttccatctgcaaaatagttaacaatttatttttataaatataattgttagtttgtttggtaggtggtgtttgagctttggctaaaggtagttttcctttagtattggtggctgttttggtcattgacgcattttggatcattgtttgtaaatttgattcagattcatcatcagattcggaggcaatgtctgcccaagattttttgattatttttggaaatttggtcagacccatgtcttgaagggcctgaagggtctcaattggccatgcatagtcggccgatgtttgtttggcggttgccggtttggga

SEQ ID NO: 15573 - DNA, 1130 bp, Glycine max
  Gm_smallRNAprecursor_8406
ccttcagatttttagctaagacctcctttgatgtcgatcctgctaaaaatgctgccagatgagacttttggttcaaaaacacagaagtctctagatcagctgctttgaggaattctggatgggattggaaccatagttttacttggtctggatccgctttggatgagtcaaattgtgtccaccattttacaaatgcgtgtctttgtagtgatggatattggtttgtcttttcagtcttcctgtaacgatattgccatgagaatatccatgacagtgcaaagcttgaaaagtatttaagatctgctggaattcgtgattcctgcgaattgtattgtttcttaaattgggaaaatccttgttggaccgtttctgggaatatctctgggattggtccaaagaagtcccaccattgcaaaaaccagttgggaaaattgtagattgtgttggtcttgaaatatatcagccatgaatgcttgaagcgggtattttggtgccaaaacaccttagtccaagcatcaacgtaatcccaataagtataacctaccggatcaaatggaactgaaaatctctttcctttgttcaagtccgaaccaaagtgtcttggttgaagaacttttagtatttggatggttgagtgggtgtttaaggtttggtcttttggatctttgaaatgtttgatagatactgagtttgaatctaccaaaatcaattcataaaaagttcttgtcttcaggatggtggttggtttatagtgaaatcctggtgggaaagccttggccgtcgccttgaagggatttttgtcccaaaattcaggttccatctgcaaaatagttaacaatttatttttataaatataattgttagtttgtttggtaggtggtgtttgagctttggctaaaggtagttttcctttagtattggtggctgttttggtcattgacgcattttggatcattgtttgtaaatttgattcagattcatcatcagattcggaggcaatgtctgcccaagattttttgattatttttggaaatttggtcagacccatgtcttgaagggcctgaagggtctcaattggccatgcatagtcggccgatgtttgtttggcggttgccggtttgggagattct

SEQ ID NO: 15574 - DNA, 1087 bp, Glycine max
  Gm_smallRNAprecursor_8407
tcctgctaaaaatgctgccagatgagacttttggttcaaaaacacagaagtctctagatcagctgctttgaggaattctggatgggattggaaccatagttttacttggtctggatccgctttggatgagtcaaattgtgtccaccattttacaaatgcgtgtctttgtagtgatggatattggtttgtcttttcagtcttcctgtaacgatattgccatgagaatatccatgacagtgcaaagcttgaaaagtatttaagatctgctggaattcgtgattcctgcgaattgtattgtttcttaaattgggaaaatccttgttggaccgtttctgggaatatctctgggattggtccaaagaagtcccaccattgcaaaaaccagttgggaaaattgtagattgtgttggtcttgaaatatatcagccatgaatgcttgaagcgggtattttggtgccaaaacaccttagtccaagcatcaacgtaatcccaataagtataacctaccggatcaaatggaactgaaaatctctttcctttgttcaagtccgaaccaaagtgtcttggttgaagaacttttagtatttggatggttgagtgggtgtttaaggtttggtcttttggatctttgaaatgtttgatagatactgagtttgaatctaccaaaatcaattcataaaaagttcttgtcttcaggatggtggttggtttatagtgaaatcctggtgggaaagccttggccgtcgccttgaagggatttttgtcccaaaattcaggttccatctgcaaaatagttaacaatttatttttataaatataattgttagtttgtttggtaggtggtgtttgagctttggctaaaggtagttttcctttagtattggtggctgttttggtcattgacgcattttggatcattgtttgtaaatttgattcagattcatcatcagattcggaggcaatgtctgcccaagattttttgattatttttggaaatttggtcagacccatgtcttgaagggcctgaagggtctcaattggccatgcatagtcggccgatgtttgtttggcggttgccggtttggga

SEQ ID NO: 15575 - DNA, 1071 bp, Glycine max
  Gm_smallRNAprecursor_8408
ctaaattggttttctgggtagatgacccagcctgggttggtgacccagaagaggtagatgatttcttgatggttggctctggaagagccagcctggctcctttgcctgtactccttcctccccgtagggagattcccgatgccttaggaggcattaccacttttctgtaagaattcacgggtaaggtagtcaggtagtgaatttgaggtgcccttgatgtattctatgtcaaaatcaaagacacttaaaattgcttgccatcgtgcaaaaatttgttttgaggcaaggtctttaacatctttttgtaaaatatctttggctgatttacaatcaaccctgattaaaaattttggtttaataaatccgattgaaatttggaaatgcacaaaacaattgctaaaacttcttttttaacagttgaatattttaattgtgcaggattccaatgttttgatgtatatgcaatgacatgatctttgccatggactctttgtttgaggatgccaccataacctatgtctgaagcatcagtttcgacaattttaaatgcctgtggaataggaagatatagacatttaatggattggactttgactttgatttctttaaccgtttgtgtatggaggtcagaccaaggaggcggatttttcttcagcctatcatgtaatggtttgacaatattatttaaataggggacaaattctcctacgtaatttagacaacctagaaatctttgtaactgggttttgtctaagatttggttggggaatttgctagcaaactctattgacctttcgattggaatgattgtaccttgatatatattgtgaccaaggaatcaaattcgagtttgaaaaagattgatttttgatttggagactgccaaaccattttgtttgatgatatgtatgaaggtttggagatgtttgaaatgttggtcaatgttttggaaaaagattaaaacatcatctatgtagacaatgacaaattttgagtagggattaaaaatatcgttcataattttttgaaattctgaaggggctttctttagtccgaacggcatcacgttcc

SEQ ID NO: 15576 - DNA, 1073 bp, Glycine max
  Gm_smallRNAprecursor_8409
ctaaattggttttctgggtagatgacccagcctgggttggtgacccagaagaggtagatgatttcttgatggttggctctggaagagccagcctggctcctttgcctgtactccttcctccccgtagggagattcccgatgccttaggaggcattaccacttttctgtaagaattcacgggtaaggtagtcaggtagtgaatttgaggtgcccttgatgtattctatgtcaaaatcaaagacacttaaaattgcttgccatcgtgcaaaaatttgttttgaggcaaggtctttaacatctttttgtaaaatatctttggctgatttacaatcaaccctgattaaaaattttggtttaataaatccgattgaaatttggaaatgcacaaaacaattgctaaaacttcttttttaacagttgaatattttaattgtgcaggattccaatgttttgatgtatatgcaatgacatgatctttgccatggactctttgtttgaggatgccaccataacctatgtctgaagcatcagtttcgacaattttaaatgcctgtggaataggaagatatagacatttaatggattggactttgactttgatttctttaaccgtttgtgtatggaggtcagaccaaggaggcggatttttcttcagcctatcatgtaatggtttgacaatattatttaaataggggacaaattctcctacgtaatttagacaacctagaaatctttgtaactgggttttgtctaagatttggttggggaatttgctagcaaactctattgacctttcgattggaatgattgtaccttgatatatattgtgaccaaggaatcaaattcgagtttgaaaaagattgatttttgatttggagactgccaaaccattttgtttgatgatatgtatgaaggtttggagatgtttgaaatgttggtcaatgttttggaaaaagattaaaacatcatctatgtagacaatgacaaattttgagtagggattaaaaatatcgttcataattttttgaaattctgaaggggctttctttagtccgaacggcatcacgttccat

SEQ ID NO: 15577 - DNA, 1247 bp, Glycine max
  Gm_smallRNAprecursor_8410
tctgagttttggtcactatcttcattaataacattgattaatttggaggtacttcttgttaccattttggaagtattttccgaggcttggggggtatctggaatgactttaagtaaactaccaatcttgtttagtaattcactatggttgtcacctacgccttcaattaaggattaagtaaacttctttcatgccaaggccatgaaagtggatgtttaagaacagagagtcaagaatgtttctgtccatcagactcgctgttttgtttggataacaattaaaatatattggaccttgtcctaggctggtctcgactgttccaattagggagtcttcaaattgattatgcctaatatctcttagacacattaaaactgctgcatctatgcccatatcaattaagggcttgatggctacttgtacacaaccgatgtgtagatatttatacttacggctatgttcataaattgaattttttgaaagtagatgaaattcttcccctatatcttgtcctagaggaatattgttttctactgttttgattatgtaatcaaagttgtgtttgtctttaattgttttaggaacgtatagttgatcctgagggatttctggaatgttccagtcatccatgttttgattaatatcttcgaatcggacttcctgtttaatttttacaatagcccaacatttcattggagacccatccttgtggaaagataggtctgccgaattattgtcaaatcttaagtgtagaaccttagcggattttaggtggtatagagatactttcctaactagggtttacacaagagaagatagtcaacaaccttaacctagaattgtggaaaacaaggccacatcagcaaatactgtaggctaaaaaagaagttaagaaaccttaacctagaacccgcaattgaagagcaaataaacaatttgctcatagaaacctcggaggaagaaacagaaacttcatcctccgtgctttccgatgaaaacctaaacttaatccaacaagatgaccaactatcatcaacagatgatgatgatgggcaaatcaatactctaacgagagaacaggatctcttgtttgaagcaatcaattccatacctgacccccaggaaaagaaggtttttctggaaaaactcgagaaaacgttagaggtaaaacctagacaaaaggattttatcacaaacaacaaatttgatgtaagtaacatactcaagagattagaaaattcttcaac

SEQ ID NO: 15578 - DNA, 1126 bp, Glycine max
  Gm_smallRNAprecursor_8411
aaaattaagtacggcaaacggctcaaaattaaaaattaattttaagctatcaaatgcaatcattgaaaaccaaggtcttaagattaacacaaactttcttctggtaaaaaaccttaagaatgaagtaatcttaggaacgcccttcattagagccctgtttcccatccaaatatctaatgaaggaataaccacaaattatttaggaagaaaaattatatttaatttttctactaaaccaatttctagaaatataaatcttatagaaaataagattaatcaaattaacttcttaaaagaagaagtatcttttaataatattcagatacaactgggaaaaccccaagtaaaagaaatattgtcgatctcccttatgagaaagactttagggaaaaacaaattcccacaaaagccagaccaatccaaatgaatgaagaacttcttcaatactgtcaaaaggaaatcaaggatttgcttgataaaggcctaatccggaaaagcaaaagcccatggtcttgtgcggctttttatgttaacaaacaatctgagattgagcgtggaacaccccgcttagtcataaattacaaaccattaaatcaagcattacaatggattagatatcctattccaaacaaaaaagatttgcttaacagattaaaatctgcaaagatattttcaaaatttgatatgaaatctggattttggcaaatccaaatccaagaatcagacaggtacaaaacagcgtttactgtacctttcgggcaatatgaatggaacgtgatgccgttcggactgaagaatgccccttccgaattataaaaaattatgaacgatatttttaatccctattcaaaatttgtcattgtctacatagatgatgttttaatcttttcacaaaacattgaccaacatttcaaacatctccaaacattcatacatatcatcaaacaaaatggtttggcagtctccaaatcaaaaatcaatcttttccaaactcgaattcgattccttggtcacaatatatatcaaggtacaatcattccaatcgaaaggtcaatagagtttgctagcaaattccccaaccaaatcttagacaaaacctagttacaaagatttctaggttgtctaa

SEQ ID NO: 15579 - DNA, 1234 bp, Glycine max
  Gm_smallRNAprecursor_8412
atagaaaataagattaatcaaattaacttcttaaaagaagaagtatcttttaataatattcagatacaactgggaaaaccccaagtaaaagaaatattgtcgatctcccttatgagaaagactttagggaaaaacaaattcccacaaaagccagaccaatccaaatgaatgaagaacttcttcaatactgtcaaaaggaaatcaaggatttgcttgataaaggcctaatccggaaaagcaaaagcccatggtcttgtgcggctttttatgttaacaaacaatctgagattgagcgtggaacaccccgcttagtcataaattacaaaccattaaatcaagcattacaatggattagatatcctattccaaacaaaaaagatttgcttaacagattaaaatctgcaaagatattttcaaaatttgatatgaaatctggattttggcaaatccaaatccaagaatcagacaggtacaaaacagcgtttactgtacctttcgggcaatatgaatggaacgtgatgccgttcggactgaagaatgccccttccgaattataaaaaattatgaacgatatttttaatccctattcaaaatttgtcattgtctacatagatgatgttttaatcttttcacaaaacattgaccaacatttcaaacatctccaaacattcatacatatcatcaaacaaaatggtttggcagtctccaaatcaaaaatcaatcttttccaaactcgaattcgattccttggtcacaatatatatcaaggtacaatcattccaatcgaaaggtcaatagagtttgctagcaaattccccaaccaaatcttagacaaaacctagttacaaagatttctaggttgtctaaattacgtaggagaatttgtcccctatttaaataatattgtcaagccattacatgataggctgaagaaaaatccgcctccttggtctgacctccatacacaaacggttaaagaaatcaaagtcaaagtccaatccattaaatgtctgtatcttcctattccacaggcatttaaaattgtcgaaactgatgcttcagacataggttatggtggcatcctcaaacaaagagtccatggctaagatcatgtcattgcatatacatcaaaacattggaatcctgcacaattaaaatattcaactgttaaaaaagaagttttagcaattgttttgtgcatttccaaatttcaatcggatttattaaaccaaaa

SEQ ID NO: 15580 - DNA, 1080 bp, Glycine max
  Gm_smallRNAprecursor_8413
aaaagcaaaagcccatggtcttgtgcggctttttatgttaacaaacaatctgagattgagcgtggaacaccccgcttagtcataaattacaaaccattaaatcaagcattacaatggattagatatcctattccaaacaaaaaagatttgcttaacagattaaaatctgcaaagatattttcaaaatttgatatgaaatctggattttggcaaatccaaatccaagaatcagacaggtacaaaacagcgtttactgtacctttcgggcaatatgaatggaacgtgatgccgttcggactgaagaatgccccttccgaattataaaaaattatgaacgatatttttaatccctattcaaaatttgtcattgtctacatagatgatgttttaatcttttcacaaaacattgaccaacatttcaaacatctccaaacattcatacatatcatcaaacaaaatggtttggcagtctccaaatcaaaaatcaatcttttccaaactcgaattcgattccttggtcacaatatatatcaaggtacaatcattccaatcgaaaggtcaatagagtttgctagcaaattccccaaccaaatcttagacaaaacctagttacaaagatttctaggttgtctaaattacgtaggagaatttgtcccctatttaaataatattgtcaagccattacatgataggctgaagaaaaatccgcctccttggtctgacctccatacacaaacggttaaagaaatcaaagtcaaagtccaatccattaaatgtctgtatcttcctattccacaggcatttaaaattgtcgaaactgatgcttcagacataggttatggtggcatcctcaaacaaagagtccatggctaagatcatgtcattgcatatacatcaaaacattggaatcctgcacaattaaaatattcaactgttaaaaaagaagttttagcaattgttttgtgcatttccaaatttcaatcggatttattaaaccaaaaatttttaatcagggttgattgtaaatcagccaaagatattttacaaaaagatgttaaaaaccttgcctcaaaacaaatt

SEQ ID NO: 15581 - DNA, 1192 bp, Glycine max
  Gm_smallRNAprecursor_8414
aaagtggtaatgcctcctaaggcatcgggaatctccctacgaggaggaaggagtacaggcaaaggagccaggctggctcttccagagccaaccatcaagaaatcatctacctcttctgggtcaccaacccaggctgggtcatctacccagaaaaccaatttagaagggtcatcaacccagattgcctcaatcaaacccgagccatccactcaggaatctcccaaaccgacaaccgccaaacaaacatcggccgactatgcatggccaattgaaacccttcaggcccttcaagacatgggtctgaccaaatttccaaaaataatcaaaaaatcttgggcagacattgcctcagaatctgatgatgaatctgaatcaaatttacaaacaatgatccaaaatgcgtcaatgaccaaaacaaccaccaatactaaaggaaaactacctttagccaaatctcaaacaccacctaccaaacaaactaacaattatatttataaaaataaattgttaactgttttgcagatggaacctgaattttgggacaaaaatcccttcaaggcgacggccaaggctttcccaccaggatttcactacaaaccaaccaccatcctgaagacaagaactttttatgaattgattttggtagattcaaactcagtatctatcaaacatttcaaagatccaaaagaccaaaccttaaacacccactcaaccatccaaatactaaaagttcttcaaccgagacactttggttcggacttgaacaaaggaaagagattttcagttccatttgatccggtaggttatacctattgggattacgttgatgcttggactaaggtgttttggcaccaaaatacccgcttcaagcattcatggctgatatatttcaagaccaacacaatttacaattttcccaattggtttttgcaatggtgggacttctttggaccaatcccagagatattcccagaaacggtccaacaaggattttcccaatttaagaaacaacacaattcgcaggaatcacgaattccagcagatcttaaatacttttcaagctttgcactgtcatggatattctcatggcaatatcgttacagcaagactgaaaagacaaaccaatatccatcactacaaagacacgcatttgtaaaatggtggacacaatttgactcatccaaagcggatc

SEQ ID NO: 15582 - DNA, 1099 bp, Glycine max
  Gm_smallRNAprecursor_8415
gtaatgcctcctaaggcatcgggaatctccctacgaggaggaaggagtacaggcaaaggagccaggctggctcttccagagccaaccatcaagaaatcatctacctcttctgggtcaccaacccaggctgggtcatctacccagaaaaccaatttagaagggtcatcaacccagattgcctcaatcaaacccgagccatccactcaggaatctcccaaaccgacaaccgccaaacaaacatcggccgactatgcatggccaattgaaacccttcaggcccttcaagacatgggtctgaccaaatttccaaaaataatcaaaaaatcttgggcagacattgcctcagaatctgatgatgaatctgaatcaaatttacaaacaatgatccaaaatgcgtcaatgaccaaaacaaccaccaatactaaaggaaaactacctttagccaaatctcaaacaccacctaccaaacaaactaacaattatatttataaaaataaattgttaactgttttgcagatggaacctgaattttgggacaaaaatcccttcaaggcgacggccaaggctttcccaccaggatttcactacaaaccaaccaccatcctgaagacaagaactttttatgaattgattttggtagattcaaactcagtatctatcaaacatttcaaagatccaaaagaccaaaccttaaacacccactcaaccatccaaatactaaaagttcttcaaccgagacactttggttcggacttgaacaaaggaaagagattttcagttccatttgatccggtaggttatacctattgggattacgttgatgcttggactaaggtgttttggcaccaaaatacccgcttcaagcattcatggctgatatatttcaagaccaacacaatttacaattttcccaattggtttttgcaatggtgggacttctttggaccaatcccagagatattcccagaaacggtccaacaaggattttcccaatttaagaaacaacacaattcgcaggaatcacgaattccagcagatcttaaatacttttcaagctttgcactgtcatggatattctcatggcaatatcgttacagca

SEQ ID NO: 15583 - DNA, 1158 bp, Glycine max
  Gm_smallRNAprecursor_8416
ctaaggcatcgggaatctccctacgaggaggaaggagtacaggcaaaggagccaggctggctcttccagagccaaccatcaagaaatcatctacctcttctgggtcaccaacccaggctgggtcatctacccagaaaaccaatttagaagggtcatcaacccagattgcctcaatcaaacccgagccatccactcaggaatctcccaaaccgacaaccgccaaacaaacatcggccgactatgcatggccaattgaaacccttcaggcccttcaagacatgggtctgaccaaatttccaaaaataatcaaaaaatcttgggcagacattgcctcagaatctgatgatgaatctgaatcaaatttacaaacaatgatccaaaatgcgtcaatgaccaaaacaaccaccaatactaaaggaaaactacctttagccaaatctcaaacaccacctaccaaacaaactaacaattatatttataaaaataaattgttaactgttttgcagatggaacctgaattttgggacaaaaatcccttcaaggcgacggccaaggctttcccaccaggatttcactacaaaccaaccaccatcctgaagacaagaactttttatgaattgattttggtagattcaaactcagtatctatcaaacatttcaaagatccaaaagaccaaaccttaaacacccactcaaccatccaaatactaaaagttcttcaaccgagacactttggttcggacttgaacaaaggaaagagattttcagttccatttgatccggtaggttatacctattgggattacgttgatgcttggactaaggtgttttggcaccaaaatacccgcttcaagcattcatggctgatatatttcaagaccaacacaatttacaattttcccaattggtttttgcaatggtgggacttctttggaccaatcccagagatattcccagaaacggtccaacaaggattttcccaatttaagaaacaacacaattcgcaggaatcacgaattccagcagatcttaaatacttttcaagctttgcactgtcatggatattctcatggcaatatcgttacagcaagactgaaaagacaaaccaatatccatcactacaaagacacgcatttgtaaaatggtggacacaatttg

SEQ ID NO: 15584 - DNA, 1167 bp, Glycine max
  Gm_smallRNAprecursor_8417
ctaaggcatcgggaatctccctacgaggaggaaggagtacaggcaaaggagccaggctggctcttccagagccaaccatcaagaaatcatctacctcttctgggtcaccaacccaggctgggtcatctacccagaaaaccaatttagaagggtcatcaacccagattgcctcaatcaaacccgagccatccactcaggaatctcccaaaccgacaaccgccaaacaaacatcggccgactatgcatggccaattgaaacccttcaggcccttcaagacatgggtctgaccaaatttccaaaaataatcaaaaaatcttgggcagacattgcctcagaatctgatgatgaatctgaatcaaatttacaaacaatgatccaaaatgcgtcaatgaccaaaacaaccaccaatactaaaggaaaactacctttagccaaatctcaaacaccacctaccaaacaaactaacaattatatttataaaaataaattgttaactgttttgcagatggaacctgaattttgggacaaaaatcccttcaaggcgacggccaaggctttcccaccaggatttcactacaaaccaaccaccatcctgaagacaagaactttttatgaattgattttggtagattcaaactcagtatctatcaaacatttcaaagatccaaaagaccaaaccttaaacacccactcaaccatccaaatactaaaagttcttcaaccgagacactttggttcggacttgaacaaaggaaagagattttcagttccatttgatccggtaggttatacctattgggattacgttgatgcttggactaaggtgttttggcaccaaaatacccgcttcaagcattcatggctgatatatttcaagaccaacacaatttacaattttcccaattggtttttgcaatggtgggacttctttggaccaatcccagagatattcccagaaacggtccaacaaggattttcccaatttaagaaacaacacaattcgcaggaatcacgaattccagcagatcttaaatacttttcaagctttgcactgtcatggatattctcatggcaatatcgttacagcaagactgaaaagacaaaccaatatccatcactacaaagacacgcatttgtaaaatggtggacacaatttgactcatcca

SEQ ID NO: 15585 - DNA, 1098 bp, Glycine max
  Gm_smallRNAprecursor_8418
ggaatctccctacgaggaggaaggagtacaggcaaaggagccaggctggctcttccagagccaaccatcaagaaatcatctacctcttctgggtcaccaacccaggctgggtcatctacccagaaaaccaatttagaagggtcatcaacccagattgcctcaatcaaacccgagccatccactcaggaatctcccaaaccgacaaccgccaaacaaacatcggccgactatgcatggccaattgaaacccttcaggcccttcaagacatgggtctgaccaaatttccaaaaataatcaaaaaatcttgggcagacattgcctcagaatctgatgatgaatctgaatcaaatttacaaacaatgatccaaaatgcgtcaatgaccaaaacaaccaccaatactaaaggaaaactacctttagccaaatctcaaacaccacctaccaaacaaactaacaattatatttataaaaataaattgttaactgttttgcagatggaacctgaattttgggacaaaaatcccttcaaggcgacggccaaggctttcccaccaggatttcactacaaaccaaccaccatcctgaagacaagaactttttatgaattgattttggtagattcaaactcagtatctatcaaacatttcaaagatccaaaagaccaaaccttaaacacccactcaaccatccaaatactaaaagttcttcaaccgagacactttggttcggacttgaacaaaggaaagagattttcagttccatttgatccggtaggttatacctattgggattacgttgatgcttggactaaggtgttttggcaccaaaatacccgcttcaagcattcatggctgatatatttcaagaccaacacaatttacaattttcccaattggtttttgcaatggtgggacttctttggaccaatcccagagatattcccagaaacggtccaacaaggattttcccaatttaagaaacaacacaattcgcaggaatcacgaattccagcagatcttaaatacttttcaagctttgcactgtcatggatattctcatggcaatatcgttacagcaagactgaaaagacaaaccaa

SEQ ID NO: 15586 - DNA, 1190 bp, Glycine max
  Gm_smallRNAprecursor_8419
acaggcaaaggagccaggctggctcttccagagccaaccatcaagaaatcatctacctcttctgggtcaccaacccaggctgggtcatctacccagaaaaccaatttagaagggtcatcaacccagattgcctcaatcaaacccgagccatccactcaggaatctcccaaaccgacaaccgccaaacaaacatcggccgactatgcatggccaattgaaacccttcaggcccttcaagacatgggtctgaccaaatttccaaaaataatcaaaaaatcttgggcagacattgcctcagaatctgatgatgaatctgaatcaaatttacaaacaatgatccaaaatgcgtcaatgaccaaaacaaccaccaatactaaaggaaaactacctttagccaaatctcaaacaccacctaccaaacaaactaacaattatatttataaaaataaattgttaactgttttgcagatggaacctgaattttgggacaaaaatcccttcaaggcgacggccaaggctttcccaccaggatttcactacaaaccaaccaccatcctgaagacaagaactttttatgaattgattttggtagattcaaactcagtatctatcaaacatttcaaagatccaaaagaccaaaccttaaacacccactcaaccatccaaatactaaaagttcttcaaccgagacactttggttcggacttgaacaaaggaaagagattttcagttccatttgatccggtaggttatacctattgggattacgttgatgcttggactaaggtgttttggcaccaaaatacccgcttcaagcattcatggctgatatatttcaagaccaacacaatttacaattttcccaattggtttttgcaatggtgggacttctttggaccaatcccagagatattcccagaaacggtccaacaaggattttcccaatttaagaaacaacacaattcgcaggaatcacgaattccagcagatcttaaatacttttcaagctttgcactgtcatggatattctcatggcaatatcgttacagcaagactgaaaagacaaaccaatatccatcactacaaagacacgcatttgtaaaatggtggacacaatttgactcatccaaagcggatccagaacaagtaaaactatggttccaatcccatccagaattcctcaaggcagc

SEQ ID NO: 15587 - DNA, 1148 bp, Glycine max
  Gm_smallRNAprecursor_8420
tgcctcaatcaaacccgagccatccactcaggaatctcccaaaccgacaaccgccaaacaaacatcggccgactatgcatggccaattgaaacccttcaggcccttcaagacatgggtctgaccaaatttccaaaaataatcaaaaaatcttgggcagacattgcctcagaatctgatgatgaatctgaatcaaatttacaaacaatgatccaaaatgcgtcaatgaccaaaacaaccaccaatactaaaggaaaactacctttagccaaatctcaaacaccacctaccaaacaaactaacaattatatttataaaaataaattgttaactgttttgcagatggaacctgaattttgggacaaaaatcccttcaaggcgacggccaaggctttcccaccaggatttcactacaaaccaaccaccatcctgaagacaagaactttttatgaattgattttggtagattcaaactcagtatctatcaaacatttcaaagatccaaaagaccaaaccttaaacacccactcaaccatccaaatactaaaagttcttcaaccgagacactttggttcggacttgaacaaaggaaagagattttcagttccatttgatccggtaggttatacctattgggattacgttgatgcttggactaaggtgttttggcaccaaaatacccgcttcaagcattcatggctgatatatttcaagaccaacacaatttacaattttcccaattggtttttgcaatggtgggacttctttggaccaatcccagagatattcccagaaacggtccaacaaggattttcccaatttaagaaacaacacaattcgcaggaatcacgaattccagcagatcttaaatacttttcaagctttgcactgtcatggatattctcatggcaatatcgttacagcaagactgaaaagacaaaccaatatccatcactacaaagacacgcatttgtaaaatggtggacacaatttgactcatccaaagcggatccagaacaagtaaaactatggttccaatcccatccagaattcctcaaggcagctgatccagagacttctgtgtttttgaaccaaaagtctcatctggcagcatttttagcaggatcgacatcaaaggaggtcttagcta

SEQ ID NO: 15588 - DNA, 1149 bp, Glycine max
  Gm_smallRNAprecursor_8421
tgcctcaatcaaacccgagccatccactcaggaatctcccaaaccgacaaccgccaaacaaacatcggccgactatgcatggccaattgaaacccttcaggcccttcaagacatgggtctgaccaaatttccaaaaataatcaaaaaatcttgggcagacattgcctcagaatctgatgatgaatctgaatcaaatttacaaacaatgatccaaaatgcgtcaatgaccaaaacaaccaccaatactaaaggaaaactacctttagccaaatctcaaacaccacctaccaaacaaactaacaattatatttataaaaataaattgttaactgttttgcagatggaacctgaattttgggacaaaaatcccttcaaggcgacggccaaggctttcccaccaggatttcactacaaaccaaccaccatcctgaagacaagaactttttatgaattgattttggtagattcaaactcagtatctatcaaacatttcaaagatccaaaagaccaaaccttaaacacccactcaaccatccaaatactaaaagttcttcaaccgagacactttggttcggacttgaacaaaggaaagagattttcagttccatttgatccggtaggttatacctattgggattacgttgatgcttggactaaggtgttttggcaccaaaatacccgcttcaagcattcatggctgatatatttcaagaccaacacaatttacaattttcccaattggtttttgcaatggtgggacttctttggaccaatcccagagatattcccagaaacggtccaacaaggattttcccaatttaagaaacaacacaattcgcaggaatcacgaattccagcagatcttaaatacttttcaagctttgcactgtcatggatattctcatggcaatatcgttacagcaagactgaaaagacaaaccaatatccatcactacaaagacacgcatttgtaaaatggtggacacaatttgactcatccaaagcggatccagaacaagtaaaactatggttccaatcccatccagaattcctcaaggcagctgatccagagacttctgtgtttttgaaccaaaagtctcatctggcagcatttttagcaggatcgacatcaaaggaggtcttagctaa

SEQ ID NO: 15589 - DNA, 1249 bp, Glycine max
  Gm_smallRNAprecursor_8422
tgcctcaatcaaacccgagccatccactcaggaatctcccaaaccgacaaccgccaaacaaacatcggccgactatgcatggccaattgaaacccttcaggcccttcaagacatgggtctgaccaaatttccaaaaataatcaaaaaatcttgggcagacattgcctcagaatctgatgatgaatctgaatcaaatttacaaacaatgatccaaaatgcgtcaatgaccaaaacaaccaccaatactaaaggaaaactacctttagccaaatctcaaacaccacctaccaaacaaactaacaattatatttataaaaataaattgttaactgttttgcagatggaacctgaattttgggacaaaaatcccttcaaggcgacggccaaggctttcccaccaggatttcactacaaaccaaccaccatcctgaagacaagaactttttatgaattgattttggtagattcaaactcagtatctatcaaacatttcaaagatccaaaagaccaaaccttaaacacccactcaaccatccaaatactaaaagttcttcaaccgagacactttggttcggacttgaacaaaggaaagagattttcagttccatttgatccggtaggttatacctattgggattacgttgatgcttggactaaggtgttttggcaccaaaatacccgcttcaagcattcatggctgatatatttcaagaccaacacaatttacaattttcccaattggtttttgcaatggtgggacttctttggaccaatcccagagatattcccagaaacggtccaacaaggattttcccaatttaagaaacaacacaattcgcaggaatcacgaattccagcagatcttaaatacttttcaagctttgcactgtcatggatattctcatggcaatatcgttacagcaagactgaaaagacaaaccaatatccatcactacaaagacacgcatttgtaaaatggtggacacaatttgactcatccaaagcggatccagaacaagtaaaactatggttccaatcccatccagaattcctcaaggcagctgatccagagacttctgtgtttttgaaccaaaagtctcatctggcagcatttttagcaggatcgacatcaaaggaggtcttagctaaaaatctgaaggaagttctacaaatgttacaacaggaagaagaagcttcatcctcaaagaaggaagaaacaagttctgctgaagaagacgaagaagatccc

SEQ ID NO: 15590 - DNA, 1134 bp, Glycine max
  Gm_smallRNAprecursor_8423
caaacccgagccatccactcaggaatctcccaaaccgacaaccgccaaacaaacatcggccgactatgcatggccaattgaaacccttcaggcccttcaagacatgggtctgaccaaatttccaaaaataatcaaaaaatcttgggcagacattgcctcagaatctgatgatgaatctgaatcaaatttacaaacaatgatccaaaatgcgtcaatgaccaaaacaaccaccaatactaaaggaaaactacctttagccaaatctcaaacaccacctaccaaacaaactaacaattatatttataaaaataaattgttaactgttttgcagatggaacctgaattttgggacaaaaatcccttcaaggcgacggccaaggctttcccaccaggatttcactacaaaccaaccaccatcctgaagacaagaactttttatgaattgattttggtagattcaaactcagtatctatcaaacatttcaaagatccaaaagaccaaaccttaaacacccactcaaccatccaaatactaaaagttcttcaaccgagacactttggttcggacttgaacaaaggaaagagattttcagttccatttgatccggtaggttatacctattgggattacgttgatgcttggactaaggtgttttggcaccaaaatacccgcttcaagcattcatggctgatatatttcaagaccaacacaatttacaattttcccaattggtttttgcaatggtgggacttctttggaccaatcccagagatattcccagaaacggtccaacaaggattttcccaatttaagaaacaacacaattcgcaggaatcacgaattccagcagatcttaaatacttttcaagctttgcactgtcatggatattctcatggcaatatcgttacagcaagactgaaaagacaaaccaatatccatcactacaaagacacgcatttgtaaaatggtggacacaatttgactcatccaaagcggatccagaacaagtaaaactatggttccaatcccatccagaattcctcaaggcagctgatccagagacttctgtgtttttgaaccaaaagtctcatctggcagcatttttagcaggatcgacatcaaaggaggtctt

SEQ ID NO: 15591 - DNA, 1087 bp, Glycine max
  Gm_smallRNAprecursor_8424
agccatccactcaggaatctcccaaaccgacaaccgccaaacaaacatcggccgactatgcatggccaattgaaacccttcaggcccttcaagacatgggtctgaccaaatttccaaaaataatcaaaaaatcttgggcagacattgcctcagaatctgatgatgaatctgaatcaaatttacaaacaatgatccaaaatgcgtcaatgaccaaaacaaccaccaatactaaaggaaaactacctttagccaaatctcaaacaccacctaccaaacaaactaacaattatatttataaaaataaattgttaactgttttgcagatggaacctgaattttgggacaaaaatcccttcaaggcgacggccaaggctttcccaccaggatttcactacaaaccaaccaccatcctgaagacaagaactttttatgaattgattttggtagattcaaactcagtatctatcaaacatttcaaagatccaaaagaccaaaccttaaacacccactcaaccatccaaatactaaaagttcttcaaccgagacactttggttcggacttgaacaaaggaaagagattttcagttccatttgatccggtaggttatacctattgggattacgttgatgcttggactaaggtgttttggcaccaaaatacccgcttcaagcattcatggctgatatatttcaagaccaacacaatttacaattttcccaattggtttttgcaatggtgggacttctttggaccaatcccagagatattcccagaaacggtccaacaaggattttcccaatttaagaaacaacacaattcgcaggaatcacgaattccagcagatcttaaatacttttcaagctttgcactgtcatggatattctcatggcaatatcgttacagcaagactgaaaagacaaaccaatatccatcactacaaagacacgcatttgtaaaatggtggacacaatttgactcatccaaagcggatccagaacaagtaaaactatggttccaatcccatccagaattcctcaaggcagctgatccagagacttctgtgtttttgaaccaaaagtctcatct

SEQ ID NO: 15592 - DNA, 1090 bp, Glycine max
  Gm_smallRNAprecursor_8425
agccatccactcaggaatctcccaaaccgacaaccgccaaacaaacatcggccgactatgcatggccaattgaaacccttcaggcccttcaagacatgggtctgaccaaatttccaaaaataatcaaaaaatcttgggcagacattgcctcagaatctgatgatgaatctgaatcaaatttacaaacaatgatccaaaatgcgtcaatgaccaaaacaaccaccaatactaaaggaaaactacctttagccaaatctcaaacaccacctaccaaacaaactaacaattatatttataaaaataaattgttaactgttttgcagatggaacctgaattttgggacaaaaatcccttcaaggcgacggccaaggctttcccaccaggatttcactacaaaccaaccaccatcctgaagacaagaactttttatgaattgattttggtagattcaaactcagtatctatcaaacatttcaaagatccaaaagaccaaaccttaaacacccactcaaccatccaaatactaaaagttcttcaaccgagacactttggttcggacttgaacaaaggaaagagattttcagttccatttgatccggtaggttatacctattgggattacgttgatgcttggactaaggtgttttggcaccaaaatacccgcttcaagcattcatggctgatatatttcaagaccaacacaatttacaattttcccaattggtttttgcaatggtgggacttctttggaccaatcccagagatattcccagaaacggtccaacaaggattttcccaatttaagaaacaacacaattcgcaggaatcacgaattccagcagatcttaaatacttttcaagctttgcactgtcatggatattctcatggcaatatcgttacagcaagactgaaaagacaaaccaatatccatcactacaaagacacgcatttgtaaaatggtggacacaatttgactcatccaaagcggatccagaacaagtaaaactatggttccaatcccatccagaattcctcaaggcagctgatccagagacttctgtgtttttgaaccaaaagtctcatctggc

SEQ ID NO: 15593 - DNA, 1129 bp, Glycine max
  Gm_smallRNAprecursor_8426
agccatccactcaggaatctcccaaaccgacaaccgccaaacaaacatcggccgactatgcatggccaattgaaacccttcaggcccttcaagacatgggtctgaccaaatttccaaaaataatcaaaaaatcttgggcagacattgcctcagaatctgatgatgaatctgaatcaaatttacaaacaatgatccaaaatgcgtcaatgaccaaaacaaccaccaatactaaaggaaaactacctttagccaaatctcaaacaccacctaccaaacaaactaacaattatatttataaaaataaattgttaactgttttgcagatggaacctgaattttgggacaaaaatcccttcaaggcgacggccaaggctttcccaccaggatttcactacaaaccaaccaccatcctgaagacaagaactttttatgaattgattttggtagattcaaactcagtatctatcaaacatttcaaagatccaaaagaccaaaccttaaacacccactcaaccatccaaatactaaaagttcttcaaccgagacactttggttcggacttgaacaaaggaaagagattttcagttccatttgatccggtaggttatacctattgggattacgttgatgcttggactaaggtgttttggcaccaaaatacccgcttcaagcattcatggctgatatatttcaagaccaacacaatttacaattttcccaattggtttttgcaatggtgggacttctttggaccaatcccagagatattcccagaaacggtccaacaaggattttcccaatttaagaaacaacacaattcgcaggaatcacgaattccagcagatcttaaatacttttcaagctttgcactgtcatggatattctcatggcaatatcgttacagcaagactgaaaagacaaaccaatatccatcactacaaagacacgcatttgtaaaatggtggacacaatttgactcatccaaagcggatccagaacaagtaaaactatggttccaatcccatccagaattcctcaaggcagctgatccagagacttctgtgtttttgaaccaaaagtctcatctggcagcatttttagcaggatcgacatcaaaggaggtcttagc

SEQ ID NO: 15594 - DNA, 1244 bp, Glycine max
  Gm_smallRNAprecursor_8427
caagacatgggtctgaccaaatttccaaaaataatcaaaaaatcttgggcagacattgcctcagaatctgatgatgaatctgaatcaaatttacaaacaatgatccaaaatgcgtcaatgaccaaaacaaccaccaatactaaaggaaaactacctttagccaaatctcaaacaccacctaccaaacaaactaacaattatatttataaaaataaattgttaactgttttgcagatggaacctgaattttgggacaaaaatcccttcaaggcgacggccaaggctttcccaccaggatttcactacaaaccaaccaccatcctgaagacaagaactttttatgaattgattttggtagattcaaactcagtatctatcaaacatttcaaagatccaaaagaccaaaccttaaacacccactcaaccatccaaatactaaaagttcttcaaccgagacactttggttcggacttgaacaaaggaaagagattttcagttccatttgatccggtaggttatacctattgggattacgttgatgcttggactaaggtgttttggcaccaaaatacccgcttcaagcattcatggctgatatatttcaagaccaacacaatttacaattttcccaattggtttttgcaatggtgggacttctttggaccaatcccagagatattcccagaaacggtccaacaaggattttcccaatttaagaaacaacacaattcgcaggaatcacgaattccagcagatcttaaatacttttcaagctttgcactgtcatggatattctcatggcaatatcgttacagcaagactgaaaagacaaaccaatatccatcactacaaagacacgcatttgtaaaatggtggacacaatttgactcatccaaagcggatccagaacaagtaaaactatggttccaatcccatccagaattcctcaaggcagctgatccagagacttctgtgtttttgaaccaaaagtctcatctggcagcatttttagcaggatcgacatcaaaggaggtcttagctaaaaatctgaaggaagttctacaaatgttacaacaggaagaagaagcttcatcctcaaagaaggaagaaacaagttctgctgaagaagacgaagaagatcccttttaccaaaacgaagatgattgttttagtatctgtttagattaaatttaatttcggtcacaaaaccgtctgtttgtaattaatgtgtaattaatgctgga

SEQ ID NO: 15595 - DNA, 1080 bp, Glycine max
  Gm_smallRNAprecursor_8428
ccaaaaataatcaaaaaatcttgggcagacattgcctcagaatctgatgatgaatctgaatcaaatttacaaacaatgatccaaaatgcgtcaatgaccaaaacaaccaccaatactaaaggaaaactacctttagccaaatctcaaacaccacctaccaaacaaactaacaattatatttataaaaataaattgttaactgttttgcagatggaacctgaattttgggacaaaaatcccttcaaggcgacggccaaggctttcccaccaggatttcactacaaaccaaccaccatcctgaagacaagaactttttatgaattgattttggtagattcaaactcagtatctatcaaacatttcaaagatccaaaagaccaaaccttaaacacccactcaaccatccaaatactaaaagttcttcaaccgagacactttggttcggacttgaacaaaggaaagagattttcagttccatttgatccggtaggttatacctattgggattacgttgatgcttggactaaggtgttttggcaccaaaatacccgcttcaagcattcatggctgatatatttcaagaccaacacaatttacaattttcccaattggtttttgcaatggtgggacttctttggaccaatcccagagatattcccagaaacggtccaacaaggattttcccaatttaagaaacaacacaattcgcaggaatcacgaattccagcagatcttaaatacttttcaagctttgcactgtcatggatattctcatggcaatatcgttacagcaagactgaaaagacaaaccaatatccatcactacaaagacacgcatttgtaaaatggtggacacaatttgactcatccaaagcggatccagaacaagtaaaactatggttccaatcccatccagaattcctcaaggcagctgatccagagacttctgtgtttttgaaccaaaagtctcatctggcagcatttttagcaggatcgacatcaaaggaggtcttagctaaaaatctgaaggaagttctacaaatgttacaacaggaagaagaagcttcatcctcaaagaag

SEQ ID NO: 15596 - DNA, 1062 bp, Glycine max
  Gm_smallRNAprecursor_8429
tcttgggcagacattgcctcagaatctgatgatgaatctgaatcaaatttacaaacaatgatccaaaatgcgtcaatgaccaaaacaaccaccaatactaaaggaaaactacctttagccaaatctcaaacaccacctaccaaacaaactaacaattatatttataaaaataaattgttaactgttttgcagatggaacctgaattttgggacaaaaatcccttcaaggcgacggccaaggctttcccaccaggatttcactacaaaccaaccaccatcctgaagacaagaactttttatgaattgattttggtagattcaaactcagtatctatcaaacatttcaaagatccaaaagaccaaaccttaaacacccactcaaccatccaaatactaaaagttcttcaaccgagacactttggttcggacttgaacaaaggaaagagattttcagttccatttgatccggtaggttatacctattgggattacgttgatgcttggactaaggtgttttggcaccaaaatacccgcttcaagcattcatggctgatatatttcaagaccaacacaatttacaattttcccaattggtttttgcaatggtgggacttctttggaccaatcccagagatattcccagaaacggtccaacaaggattttcccaatttaagaaacaacacaattcgcaggaatcacgaattccagcagatcttaaatacttttcaagctttgcactgtcatggatattctcatggcaatatcgttacagcaagactgaaaagacaaaccaatatccatcactacaaagacacgcatttgtaaaatggtggacacaatttgactcatccaaagcggatccagaacaagtaaaactatggttccaatcccatccagaattcctcaaggcagctgatccagagacttctgtgtttttgaaccaaaagtctcatctggcagcatttttagcaggatcgacatcaaaggaggtcttagctaaaaatctgaaggaagttctacaaatgttacaacaggaagaagaagcttcatcctcaaagaag

SEQ ID NO: 15597 - DNA, 1146 bp, Glycine max
  Gm_smallRNAprecursor_8430
aatgatccaaaatgcgtcaatgaccaaaacaaccaccaatactaaaggaaaactacctttagccaaatctcaaacaccacctaccaaacaaactaacaattatatttataaaaataaattgttaactgttttgcagatggaacctgaattttgggacaaaaatcccttcaaggcgacggccaaggctttcccaccaggatttcactacaaaccaaccaccatcctgaagacaagaactttttatgaattgattttggtagattcaaactcagtatctatcaaacatttcaaagatccaaaagaccaaaccttaaacacccactcaaccatccaaatactaaaagttcttcaaccgagacactttggttcggacttgaacaaaggaaagagattttcagttccatttgatccggtaggttatacctattgggattacgttgatgcttggactaaggtgttttggcaccaaaatacccgcttcaagcattcatggctgatatatttcaagaccaacacaatttacaattttcccaattggtttttgcaatggtgggacttctttggaccaatcccagagatattcccagaaacggtccaacaaggattttcccaatttaagaaacaacacaattcgcaggaatcacgaattccagcagatcttaaatacttttcaagctttgcactgtcatggatattctcatggcaatatcgttacagcaagactgaaaagacaaaccaatatccatcactacaaagacacgcatttgtaaaatggtggacacaatttgactcatccaaagcggatccagaacaagtaaaactatggttccaatcccatccagaattcctcaaggcagctgatccagagacttctgtgtttttgaaccaaaagtctcatctggcagcatttttagcaggatcgacatcaaaggaggtcttagctaaaaatctgaaggaagttctacaaatgttacaacaggaagaagaagcttcatcctcaaagaaggaagaaacaagttctgctgaagaagacgaagaagatcccttttaccaaaacgaagatgattgttttagtatctgtttagattaaatttaatttcggtcacaaaaccgtctgtttgtaattaatgtgtaattaatgctgga

SEQ ID NO: 15598 - DNA, 1058 bp, Glycine max
  Gm_smallRNAprecursor_8431
accttaaacacccactcaaccatccaaatactaaaagttcttcaaccgagacactttggttcggacttgaacaaaggaaagagattttcagttccatttgatccggtaggttatacctattgggattacgttgatgcttggactaaggtgttttggcaccaaaatacccgcttcaagcattcatggctgatatatttcaagaccaacacaatttacaattttcccaattggtttttgcaatggtgggacttctttggaccaatcccagagatattcccagaaacggtccaacaaggattttcccaatttaagaaacaacacaattcgcaggaatcacgaattccagcagatcttaaatacttttcaagctttgcactgtcatggatattctcatggcaatatcgttacagcaagactgaaaagacaaaccaatatccatcactacaaagacacgcatttgtaaaatggtggacacaatttgactcatccaaagcggatccagaacaagtaaaactatggttccaatcccatccagaattcctcaaggcagctgatccagagacttctgtgtttttgaaccaaaagtctcatctggcagcatttttagcaggatcgacatcaaaggaggtcttagctaaaaatctgaaggaagttctacaaatgttacaacaggaagaagaagcttcatcctcaaagaaggaagaaacaagttctgctgaagaagacgaagaagatcccttttaccaaaacgaagatgattgttttagtatctgtttagattaaatttaatttcggtcacaaaaccgtctgtttgtaattaatgtgtaattaatgctggacaatactacctgtcctatagccattaaagtcccggtcaaaactacttgtcttgtaacaaacagtcaaatagtcccggtcaaaactaccggcaactaccggtcttagatttttggctatataaggagtcctcaagtatgttgtgaggcaccctttcatttagccattttttcaggtttcggaagagaggtgctctgaaacaagatttttgtaagcgcttc

SEQ ID NO: 15599 - DNA, 1036 bp, Glycine max
  Gm_smallRNAprecursor_8432
tccaaatactaaaagttcttcaaccgagacactttggttcggacttgaacaaaggaaagagattttcagttccatttgatccggtaggttatacctattgggattacgttgatgcttggactaaggtgttttggcaccaaaatacccgcttcaagcattcatggctgatatatttcaagaccaacacaatttacaattttcccaattggtttttgcaatggtgggacttctttggaccaatcccagagatattcccagaaacggtccaacaaggattttcccaatttaagaaacaacacaattcgcaggaatcacgaattccagcagatcttaaatacttttcaagctttgcactgtcatggatattctcatggcaatatcgttacagcaagactgaaaagacaaaccaatatccatcactacaaagacacgcatttgtaaaatggtggacacaatttgactcatccaaagcggatccagaacaagtaaaactatggttccaatcccatccagaattcctcaaggcagctgatccagagacttctgtgtttttgaaccaaaagtctcatctggcagcatttttagcaggatcgacatcaaaggaggtcttagctaaaaatctgaaggaagttctacaaatgttacaacaggaagaagaagcttcatcctcaaagaaggaagaaacaagttctgctgaagaagacgaagaagatcccttttaccaaaacgaagatgattgttttagtatctgtttagattaaatttaatttcggtcacaaaaccgtctgtttgtaattaatgtgtaattaatgctggacaatactacctgtcctatagccattaaagtcccggtcaaaactacttgtcttgtaacaaacagtcaaatagtcccggtcaaaactaccggcaactaccggtcttagatttttggctatataaggagtcctcaagtatgttgtgaggcaccctttcatttagccattttttcaggtttcggaagagaggtgctctgaaacaagatttttgtaagcgcttc

SEQ ID NO: 15600 - DNA, 1031 bp, Glycine max
  Gm_smallRNAprecursor_8433
gacactttggttcggacttgaacaaaggaaagagattttcagttccatttgatccggtaggttatacctattgggattacgttgatgcttggactaaggtgttttggcaccaaaatacccgcttcaagcattcatggctgatatatttcaagaccaacacaatttacaattttcccaattggtttttgcaatggtgggacttctttggaccaatcccagagatattcccagaaacggtccaacaaggattttcccaatttaagaaacaacacaattcgcaggaatcacgaattccagcagatcttaaatacttttcaagctttgcactgtcatggatattctcatggcaatatcgttacagcaagactgaaaagacaaaccaatatccatcactacaaagacacgcatttgtaaaatggtggacacaatttgactcatccaaagcggatccagaacaagtaaaactatggttccaatcccatccagaattcctcaaggcagctgatccagagacttctgtgtttttgaaccaaaagtctcatctggcagcatttttagcaggatcgacatcaaaggaggtcttagctaaaaatctgaaggaagttctacaaatgttacaacaggaagaagaagcttcatcctcaaagaaggaagaaacaagttctgctgaagaagacgaagaagatcccttttaccaaaacgaagatgattgttttagtatctgtttagattaaatttaatttcggtcacaaaaccgtctgtttgtaattaatgtgtaattaatgctggacaatactacctgtcctatagccattaaagtcccggtcaaaactacttgtcttgtaacaaacagtcaaatagtcccggtcaaaactaccggcaactaccggtcttagatttttggctatataaggagtcctcaagtatgttgtgaggcaccctttcatttagccattttttcaggtttcggaagagaggtgctctgaaacaagatttttgtaagcgcttctttctagattcaataaatttct

SEQ ID NO: 15601 - DNA, 1138 bp, Glycine max
  Gm_smallRNAprecursor_8434
ggttcggacttgaacaaaggaaagagattttcagttccatttgatccggtaggttatacctattgggattacgttgatgcttggactaaggtgttttggcaccaaaatacccgcttcaagcattcatggctgatatatttcaagaccaacacaatttacaattttcccaattggtttttgcaatggtgggacttctttggaccaatcccagagatattcccagaaacggtccaacaaggattttcccaatttaagaaacaacacaattcgcaggaatcacgaattccagcagatcttaaatacttttcaagctttgcactgtcatggatattctcatggcaatatcgttacagcaagactgaaaagacaaaccaatatccatcactacaaagacacgcatttgtaaaatggtggacacaatttgactcatccaaagcggatccagaacaagtaaaactatggttccaatcccatccagaattcctcaaggcagctgatccagagacttctgtgtttttgaaccaaaagtctcatctggcagcatttttagcaggatcgacatcaaaggaggtcttagctaaaaatctgaaggaagttctacaaatgttacaacaggaagaagaagcttcatcctcaaagaaggaagaaacaagttctgctgaagaagacgaagaagatcccttttaccaaaacgaagatgattgttttagtatctgtttagattaaatttaatttcggtcacaaaaccgtctgtttgtaattaatgtgtaattaatgctggacaatactacctgtcctatagccattaaagtcccggtcaaaactacttgtcttgtaacaaacagtcaaatagtcccggtcaaaactaccggcaactaccggtcttagatttttggctatataaggagtcctcaagtatgttgtgaggcaccctttcatttagccattttttcaggtttcggaagagaggtgctctgaaacaagatttttgtaagcgcttctttctagattcaataaatttctatttttcatccttctctcttctccctccaccgatcctgtgcggctctgccgccgcttcggtttctttgttttcaaaaacctgggtttgtaagccgtttcggtgtgcccttgatat

SEQ ID NO: 15602 - DNA, 1139 bp, Glycine max
  Gm_smallRNAprecursor_8435
ggttcggacttgaacaaaggaaagagattttcagttccatttgatccggtaggttatacctattgggattacgttgatgcttggactaaggtgttttggcaccaaaatacccgcttcaagcattcatggctgatatatttcaagaccaacacaatttacaattttcccaattggtttttgcaatggtgggacttctttggaccaatcccagagatattcccagaaacggtccaacaaggattttcccaatttaagaaacaacacaattcgcaggaatcacgaattccagcagatcttaaatacttttcaagctttgcactgtcatggatattctcatggcaatatcgttacagcaagactgaaaagacaaaccaatatccatcactacaaagacacgcatttgtaaaatggtggacacaatttgactcatccaaagcggatccagaacaagtaaaactatggttccaatcccatccagaattcctcaaggcagctgatccagagacttctgtgtttttgaaccaaaagtctcatctggcagcatttttagcaggatcgacatcaaaggaggtcttagctaaaaatctgaaggaagttctacaaatgttacaacaggaagaagaagcttcatcctcaaagaaggaagaaacaagttctgctgaagaagacgaagaagatcccttttaccaaaacgaagatgattgttttagtatctgtttagattaaatttaatttcggtcacaaaaccgtctgtttgtaattaatgtgtaattaatgctggacaatactacctgtcctatagccattaaagtcccggtcaaaactacttgtcttgtaacaaacagtcaaatagtcccggtcaaaactaccggcaactaccggtcttagatttttggctatataaggagtcctcaagtatgttgtgaggcaccctttcatttagccattttttcaggtttcggaagagaggtgctctgaaacaagatttttgtaagcgcttctttctagattcaataaatttctatttttcatccttctctcttctccctccaccgatcctgtgcggctctgccgccgcttcggtttctttgttttcaaaaacctgggtttgtaagccgtttcggtgtgcccttgatatc

SEQ ID NO: 15603 - DNA, 1141 bp, Glycine max
  Gm_smallRNAprecursor_8436
ggttcggacttgaacaaaggaaagagattttcagttccatttgatccggtaggttatacctattgggattacgttgatgcttggactaaggtgttttggcaccaaaatacccgcttcaagcattcatggctgatatatttcaagaccaacacaatttacaattttcccaattggtttttgcaatggtgggacttctttggaccaatcccagagatattcccagaaacggtccaacaaggattttcccaatttaagaaacaacacaattcgcaggaatcacgaattccagcagatcttaaatacttttcaagctttgcactgtcatggatattctcatggcaatatcgttacagcaagactgaaaagacaaaccaatatccatcactacaaagacacgcatttgtaaaatggtggacacaatttgactcatccaaagcggatccagaacaagtaaaactatggttccaatcccatccagaattcctcaaggcagctgatccagagacttctgtgtttttgaaccaaaagtctcatctggcagcatttttagcaggatcgacatcaaaggaggtcttagctaaaaatctgaaggaagttctacaaatgttacaacaggaagaagaagcttcatcctcaaagaaggaagaaacaagttctgctgaagaagacgaagaagatcccttttaccaaaacgaagatgattgttttagtatctgtttagattaaatttaatttcggtcacaaaaccgtctgtttgtaattaatgtgtaattaatgctggacaatactacctgtcctatagccattaaagtcccggtcaaaactacttgtcttgtaacaaacagtcaaatagtcccggtcaaaactaccggcaactaccggtcttagatttttggctatataaggagtcctcaagtatgttgtgaggcaccctttcatttagccattttttcaggtttcggaagagaggtgctctgaaacaagatttttgtaagcgcttctttctagattcaataaatttctatttttcatccttctctcttctccctccaccgatcctgtgcggctctgccgccgcttcggtttctttgttttcaaaaacctgggtttgtaagccgtttcggtgtgcccttgatatctg

SEQ ID NO: 15604 - DNA, 1187 bp, Glycine max
  Gm_smallRNAprecursor_8437
ggttcggacttgaacaaaggaaagagattttcagttccatttgatccggtaggttatacctattgggattacgttgatgcttggactaaggtgttttggcaccaaaatacccgcttcaagcattcatggctgatatatttcaagaccaacacaatttacaattttcccaattggtttttgcaatggtgggacttctttggaccaatcccagagatattcccagaaacggtccaacaaggattttcccaatttaagaaacaacacaattcgcaggaatcacgaattccagcagatcttaaatacttttcaagctttgcactgtcatggatattctcatggcaatatcgttacagcaagactgaaaagacaaaccaatatccatcactacaaagacacgcatttgtaaaatggtggacacaatttgactcatccaaagcggatccagaacaagtaaaactatggttccaatcccatccagaattcctcaaggcagctgatccagagacttctgtgtttttgaaccaaaagtctcatctggcagcatttttagcaggatcgacatcaaaggaggtcttagctaaaaatctgaaggaagttctacaaatgttacaacaggaagaagaagcttcatcctcaaagaaggaagaaacaagttctgctgaagaagacgaagaagatcccttttaccaaaacgaagatgattgttttagtatctgtttagattaaatttaatttcggtcacaaaaccgtctgtttgtaattaatgtgtaattaatgctggacaatactacctgtcctatagccattaaagtcccggtcaaaactacttgtcttgtaacaaacagtcaaatagtcccggtcaaaactaccggcaactaccggtcttagatttttggctatataaggagtcctcaagtatgttgtgaggcaccctttcatttagccattttttcaggtttcggaagagaggtgctctgaaacaagatttttgtaagcgcttctttctagattcaataaatttctatttttcatccttctctcttctccctccaccgatcctgtgcggctctgccgccgcttcggtttctttgttttcaaaaacctgggtttgtaagccgtttcggtgtgcccttgatatctgctttacaagtttataattcgtaagtttaattttatcatactgcatt

SEQ ID NO: 15605 - DNA, 1155 bp, Glycine max
  Gm_smallRNAprecursor_8438
tgggacttctttggaccaatcccagagatattcccagaaacggtccaacaaggattttcccaatttaagaaacaacacaattcgcaggaatcacgaattccagcagatcttaaatacttttcaagctttgcactgtcatggatattctcatggcaatatcgttacagcaagactgaaaagacaaaccaatatccatcactacaaagacacgcatttgtaaaatggtggacacaatttgactcatccaaagcggatccagaacaagtaaaactatggttccaatcccatccagaattcctcaaggcagctgatccagagacttctgtgtttttgaaccaaaagtctcatctggcagcatttttagcaggatcgacatcaaaggaggtcttagctaaaaatctgaaggaagttctacaaatgttacaacaggaagaagaagcttcatcctcaaagaaggaagaaacaagttctgctgaagaagacgaagaagatcccttttaccaaaacgaagatgattgttttagtatctgtttagattaaatttaatttcggtcacaaaaccgtctgtttgtaattaatgtgtaattaatgctggacaatactacctgtcctatagccattaaagtcccggtcaaaactacttgtcttgtaacaaacagtcaaatagtcccggtcaaaactaccggcaactaccggtcttagatttttggctatataaggagtcctcaagtatgttgtgaggcaccctttcatttagccattttttcaggtttcggaagagaggtgctctgaaacaagatttttgtaagcgcttctttctagattcaataaatttctatttttcatccttctctcttctccctccaccgatcctgtgcggctctgccgccgcttcggtttctttgttttcaaaaacctgggtttgtaagccgtttcggtgtgcccttgatatctgctttacaagtttataattcgtaagtttaattttatcatactgcattcttacttcctatctgtccgtttgatcttattccgctgatctctggtatcagagccttgatggggaagtaggaatagtgtccgtaagggcatatgttaactgaacttatggatctgaagcatgtacagtgattttaatttaaacagtatgtgttt

SEQ ID NO: 15606 - DNA, 1198 bp, Glycine max
  Gm_smallRNAprecursor_8439
aacggtccaacaaggattttcccaatttaagaaacaacacaattcgcaggaatcacgaattccagcagatcttaaatacttttcaagctttgcactgtcatggatattctcatggcaatatcgttacagcaagactgaaaagacaaaccaatatccatcactacaaagacacgcatttgtaaaatggtggacacaatttgactcatccaaagcggatccagaacaagtaaaactatggttccaatcccatccagaattcctcaaggcagctgatccagagacttctgtgtttttgaaccaaaagtctcatctggcagcatttttagcaggatcgacatcaaaggaggtcttagctaaaaatctgaaggaagttctacaaatgttacaacaggaagaagaagcttcatcctcaaagaaggaagaaacaagttctgctgaagaagacgaagaagatcccttttaccaaaacgaagatgattgttttagtatctgtttagattaaatttaatttcggtcacaaaaccgtctgtttgtaattaatgtgtaattaatgctggacaatactacctgtcctatagccattaaagtcccggtcaaaactacttgtcttgtaacaaacagtcaaatagtcccggtcaaaactaccggcaactaccggtcttagatttttggctatataaggagtcctcaagtatgttgtgaggcaccctttcatttagccattttttcaggtttcggaagagaggtgctctgaaacaagatttttgtaagcgcttctttctagattcaataaatttctatttttcatccttctctcttctccctccaccgatcctgtgcggctctgccgccgcttcggtttctttgttttcaaaaacctgggtttgtaagccgtttcggtgtgcccttgatatctgctttacaagtttataattcgtaagtttaattttatcatactgcattcttacttcctatctgtccgtttgatcttattccgctgatctctggtatcagagccttgatggggaagtaggaatagtgtccgtaagggcatatgttaactgaacttatggatctgaagcatgtacagtgattttaatttaaacagtatgtgtttgaatagtattttctggaagcacagcagtctgatattttagttgaatgatactgtagcagtaagtcccgtggatgagaaagg

SEQ ID NO: 15607 - DNA, 1098 bp, Glycine max
  Gm_smallRNAprecursor_8440
gaagatcccttttaccaaaacgaagatgattgttttagtatctgtttagattaaatttaatttcggtcacaaaaccgtctgtttgtaattaatgtgtaattaatgctggacaatactacctgtcctatagccattaaagtcccggtcaaaactacttgtcttgtaacaaacagtcaaatagtcccggtcaaaactaccggcaactaccggtcttagatttttggctatataaggagtcctcaagtatgttgtgaggcaccctttcatttagccattttttcaggtttcggaagagaggtgctctgaaacaagatttttgtaagcgcttctttctagattcaataaatttctatttttcatccttctctcttctccctccaccgatcctgtgcggctctgccgccgcttcggtttctttgttttcaaaaacctgggtttgtaagccgtttcggtgtgcccttgatatctgctttacaagtttataattcgtaagtttaattttatcatactgcattcttacttcctatctgtccgtttgatcttattccgctgatctctggtatcagagccttgatggggaagtaggaatagtgtccgtaagggcatatgttaactgaacttatggatctgaagcatgtacagtgattttaatttaaacagtatgtgtttgaatagtattttctggaagcacagcagtctgatattttagttgaatgatactgtagcagtaagtcccgtggatgagaaagggcagtaaggctaaggtgtattgttcaaataaaatattgagacataatatactggtggctataggagtaatgttcaaactatattgtctgtataaaaaaaaaaaaaaatcttctttttcatttattcagatccaagaagttctgtaacatatagccttatggaaagattcctatggaaccaaatgaaggcaaagatattagagaatgttttaatcatgtctagattattgcgatcctcttcccgtatctcttttcgctcaaattcctcctcttcatcttcttcaagaaacaccaatctcttaaatgatcaagataaccagacccaagaggtcgccccaaaacacaatct

SEQ ID NO: 15608 - DNA, 1098 bp, Glycine max; identical to SEQ ID NO: 15607
  Gm_smallRNAprecursor_8441

SEQ ID NO: 15609 - DNA, 1099 bp, Glycine max
  Gm_smallRNAprecursor_8442
gaagatcccttttaccaaaacgaagatgattgttttagtatctgtttagattaaatttaatttcggtcacaaaaccgtctgtttgtaattaatgtgtaattaatgctggacaatactacctgtcctatagccattaaagtcccggtcaaaactacttgtcttgtaacaaacagtcaaatagtcccggtcaaaactaccggcaactaccggtcttagatttttggctatataaggagtcctcaagtatgttgtgaggcaccctttcatttagccattttttcaggtttcggaagagaggtgctctgaaacaagatttttgtaagcgcttctttctagattcaataaatttctatttttcatccttctctcttctccctccaccgatcctgtgcggctctgccgccgcttcggtttctttgttttcaaaaacctgggtttgtaagccgtttcggtgtgcccttgatatctgctttacaagtttataattcgtaagtttaattttatcatactgcattcttacttcctatctgtccgtttgatcttattccgctgatctctggtatcagagccttgatggggaagtaggaatagtgtccgtaagggcatatgttaactgaacttatggatctgaagcatgtacagtgattttaatttaaacagtatgtgtttgaatagtattttctggaagcacagcagtctgatattttagttgaatgatactgtagcagtaagtcccgtggatgagaaagggcagtaaggctaaggtgtattgttcaaataaaatattgagacataatatactggtggctataggagtaatgttcaaactatattgtctgtataaaaaaaaaaaaaaatcttctttttcatttattcagatccaagaagttctgtaacatatagccttatggaaagattcctatggaaccaaatgaaggcaaagatattagagaatgttttaatcatgtctagattattgcgatcctcttcccgtatctcttttcgctcaaattcctcctcttcatcttcttcaagaaacaccaatctcttaaatgatcaagataaccagacccaagaggtcgccccaaaacacaatctc

SEQ ID NO: 15610 - DNA, 1177 bp, Glycine max
  Gm_smallRNAprecursor_8443
tcccttttaccaaaacgaagatgattgttttagtatctgtttagattaaatttaatttcggtcacaaaaccgtctgtttgtaattaatgtgtaattaatgctggacaatactacctgtcctatagccattaaagtcccggtcaaaactacttgtcttgtaacaaacagtcaaatagtcccggtcaaaactaccggcaactaccggtcttagatttttggctatataaggagtcctcaagtatgttgtgaggcaccctttcatttagccattttttcaggtttcggaagagaggtgctctgaaacaagatttttgtaagcgcttctttctagattcaataaatttctatttttcatccttctctcttctccctccaccgatcctgtgcggctctgccgccgcttcggtttctttgttttcaaaaacctgggtttgtaagccgtttcggtgtgcccttgatatctgctttacaagtttataattcgtaagtttaattttatcatactgcattcttacttcctatctgtccgtttgatcttattccgctgatctctggtatcagagccttgatggggaagtaggaatagtgtccgtaagggcatatgttaactgaacttatggatctgaagcatgtacagtgattttaatttaaacagtatgtgtttgaatagtattttctggaagcacagcagtctgatattttagttgaatgatactgtagcagtaagtcccgtggatgagaaagggcagtaaggctaaggtgtattgttcaaataaaatattgagacataatatactggtggctataggagtaatgttcaaactatattgtctgtataaaaaaaaaaaaaaatcttctttttcatttattcagatccaagaagttctgtaacatatagccttatggaaagattcctatggaaccaaatgaaggcaaagatattagagaatgttttaatcatgtctagattattgcgatcctcttcccgtatctcttttcgctcaaattcctcctcttcatcttcttcaagaaacaccaatctcttaaatgatcaagataaccagacccaagaggtcgccccaaaacacaatctcttcgatgaggaagtccgattcgaagatattaatcaaaacatggatgactggaacattccagaaatccctcaggatcaactata

SEQ ID NO: 15611 - DNA, 1157 bp, Glycine max
  Gm_smallRNAprecursor_8444
gtccgtaagggcatatgttaactgaacttatggatctgaagcatgtacagtgattttaatttaaacagtatgtgtttgaatagtattttctggaagcacagcagtctgatattttagttgaatgatactgtagcagtaagtcccgtggatgagaaagggcagtaaggctaaggtgtattgttcaaataaaatattgagacataatatactggtggctataggagtaatgttcaaactatattgtctgtataaaaaaaaaaaaaaatcttctttttcatttattcagatccaagaagttctgtaacatatagccttatggaaagattcctatggaaccaaatgaaggcaaagatattagagaatgttttaatcatgtctagattattgcgatcctcttcccgtatctcttttcgctcaaattcctcctcttcatcttcttcaagaaacaccaatctcttaaatgatcaagataaccagacccaagaggtcgccccaaaacacaatctcttcgatgaggaagtccgattcgaagatattaatcaaaacatggatgactggaacattccagaaatccctcaggatcaactatacgttcctgaaacaattaaagacaaacacaactttgattacataatcaaaacagtagaaaacaatattcctctaggacaagatataggggaagaatttcatctactttcaaaaaattcaatttatgaacatagccgtaagtataaatatctacacatcggttgtgtacaagtagccatcaagcccttaattgatatgggcatagatgcagcagttttaatgtgtctaagagatattaggcataatcaatttgaagactccctaattggaacagtcgagaccagcctaggacaaggtccaatatattttaattgttatccaaacaaaacagtgagtctgatggacagaaacattcttgactctctgttcttaaacatccactttcatggccttggcatgaaagaaggatcaatcccagcagccttaatttataggatccagtacaaggtcatgaatacttgtgcatctagagtccttttaaaacctcaaaaaggagaaacaaccttgtttatcactgatatgacaaaggctaacgtgtctctcccgagaaaaataaaatgggatgaagt

SEQ ID NO: 15612 - DNA, 1047 bp, Glycine max
  Gm_smallRNAprecursor_8445
atatactggtggctataggagtaatgttcaaactatattgtctgtataaaaaaaaaaaaaaatcttctttttcatttattcagatccaagaagttctgtaacatatagccttatggaaagattcctatggaaccaaatgaaggcaaagatattagagaatgttttaatcatgtctagattattgcgatcctcttcccgtatctcttttcgctcaaattcctcctcttcatcttcttcaagaaacaccaatctcttaaatgatcaagataaccagacccaagaggtcgccccaaaacacaatctcttcgatgaggaagtccgattcgaagatattaatcaaaacatggatgactggaacattccagaaatccctcaggatcaactatacgttcctgaaacaattaaagacaaacacaactttgattacataatcaaaacagtagaaaacaatattcctctaggacaagatataggggaagaatttcatctactttcaaaaaattcaatttatgaacatagccgtaagtataaatatctacacatcggttgtgtacaagtagccatcaagcccttaattgatatgggcatagatgcagcagttttaatgtgtctaagagatattaggcataatcaatttgaagactccctaattggaacagtcgagaccagcctaggacaaggtccaatatattttaattgttatccaaacaaaacagtgagtctgatggacagaaacattcttgactctctgttcttaaacatccactttcatggccttggcatgaaagaaggatcaatcccagcagccttaatttataggatccagtacaaggtcatgaatacttgtgcatctagagtccttttaaaacctcaaaaaggagaaacaaccttgtttatcactgatatgacaaaggctaacgtgtctctcccgagaaaaataaaatgggatgaagtaactcttcccgaaagatgggttatagataaggccacaccgtctattccccgacccgctccaaccatagagcatattaagcaagataactccgg

SEQ ID NO: 15613 - DNA, 1063 bp, Glycine max
  Gm_smallRNAprecursor_8446
agattaacacaaactttcttctggtaaaaaaccttaagaatgaagtaatcttaggaacgcccttcattagagccctgtgtcccatccaaatatctaatgaaggaataaccacaaattatttaggaagaaaaattatatttaatttttctactaaaccaatttctagaaatataaatcttatagaaaataagattaatcaaattaacttcttaaaagaagaagtatcttttaataatattcagatacaactgggaaaaccccaagtaaaagaaaaaattcaatctttattaaatcatattgaatcgaccgtttgttctgaattcccacaaaagccagaccaatccaaatgaatgaagaacttcttcaatactgtcaaaaggaaatcaaggatttgcttgataaaggcctaatccggaaaagcaaaagtccatggtcttgtgcggctttttatgttaacaaacaatctgagattgagcgtggaacaccccgcttagtcataaattacaaaccattaaatcaagcattacaatggattagatatcctattccaaacaaaaaagatttgcttaacagattaaattctgcaaagatattttcaaaatttgatatgaaatatggattttggcaaatccaaatccaagaatcagacaggtacaaaacagcgtttactgtacctttcgggcaatatgaatggaacgtgatgccgttcggactgaagaatgccccttcagaatttcaaaaaattatgaacgatatttttaatccctattcaaaatttgtcattgtctacatagatgatgttttaatcttttcccaaaacattgaccaacatttcaaacatctccaaacattcatacatatcatcaaacaaaatggtttggcagtctccaaatcaaaaatcaatcttttccaaactcgaattcgattccttggtcacaatatatatcaaggtacaatcattccaatcgaaaggtcaatagagtttgctagcaaattccccaaccaaatcttagacaaaacccagttacaaagatttctaggttgtctaaattacgtaggagaa

SEQ ID NO: 15614 - DNA, 1234 bp, Glycine max
  Gm_smallRNAprecursor_8447
gaaaataagattaatcaaattaacttcttaaaagaagaagtatcttttaataatattcagatacaactgggaaaaccccaagtaaaagaaaaaattcaatctttattaaatcatattgaatcgaccgtttgttctgaattcccacaaaagccagaccaatccaaatgaatgaagaacttcttcaatactgtcaaaaggaaatcaaggatttgcttgataaaggcctaatccggaaaagcaaaagtccatggtcttgtgcggctttttatgttaacaaacaatctgagattgagcgtggaacaccccgcttagtcataaattacaaaccattaaatcaagcattacaatggattagatatcctattccaaacaaaaaagatttgcttaacagattaaattctgcaaagatattttcaaaatttgatatgaaatatggattttggcaaatccaaatccaagaatcagacaggtacaaaacagcgtttactgtacctttcgggcaatatgaatggaacgtgatgccgttcggactgaagaatgccccttcagaatttcaaaaaattatgaacgatatttttaatccctattcaaaatttgtcattgtctacatagatgatgttttaatcttttcccaaaacattgaccaacatttcaaacatctccaaacattcatacatatcatcaaacaaaatggtttggcagtctccaaatcaaaaatcaatcttttccaaactcgaattcgattccttggtcacaatatatatcaaggtacaatcattccaatcgaaaggtcaatagagtttgctagcaaattccccaaccaaatcttagacaaaacccagttacaaagatttctaggttgtctaaattacgtaggagaatttgtcccctatttaaataatattgtcaagccattacatgataggctgaagaaaaatccgcctccttggtctgacctccatacacaaacggttaaagaaatcaaagtcaaagtccagtccattaaatgtctgtatcttcctattccacaggcatttaaaattgtcgaaactgatgcttcagacataggttatggtggcatcctcaaacaaagagtccatggccaagatcatgtcattgcatatacatcaaaacattggaatcctgcacaattaaaatattcaactgttaaaaaagaagttttagcaattgttttgtgcatttccaaatttcaattggatttattaaaccaaaa

SEQ ID NO: 15615 - DNA, 1080 bp, Glycine max
  Gm_smallRNAprecursor_8448
aaaagcaaaagtccatggtcttgtgcggctttttatgttaacaaacaatctgagattgagcgtggaacaccccgcttagtcataaattacaaaccattaaatcaagcattacaatggattagatatcctattccaaacaaaaaagatttgcttaacagattaaattctgcaaagatattttcaaaatttgatatgaaatatggattttggcaaatccaaatccaagaatcagacaggtacaaaacagcgtttactgtacctttcgggcaatatgaatggaacgtgatgccgttcggactgaagaatgccccttcagaatttcaaaaaattatgaacgatatttttaatccctattcaaaatttgtcattgtctacatagatgatgttttaatcttttcccaaaacattgaccaacatttcaaacatctccaaacattcatacatatcatcaaacaaaatggtttggcagtctccaaatcaaaaatcaatcttttccaaactcgaattcgattccttggtcacaatatatatcaaggtacaatcattccaatcgaaaggtcaatagagtttgctagcaaattccccaaccaaatcttagacaaaacccagttacaaagatttctaggttgtctaaattacgtaggagaatttgtcccctatttaaataatattgtcaagccattacatgataggctgaagaaaaatccgcctccttggtctgacctccatacacaaacggttaaagaaatcaaagtcaaagtccagtccattaaatgtctgtatcttcctattccacaggcatttaaaattgtcgaaactgatgcttcagacataggttatggtggcatcctcaaacaaagagtccatggccaagatcatgtcattgcatatacatcaaaacattggaatcctgcacaattaaaatattcaactgttaaaaaagaagttttagcaattgttttgtgcatttccaaatttcaattggatttattaaaccaaaaatttttaatcagggttgattgtaaatcagccaaagatattttacaaaaagatgttaaaaaccttgcctcaaaacaaatt

SEQ ID NO: 15616 - DNA, 1095 bp, Glycine max
  Gm_smallRNAprecursor_8449
tgaatggaacgtgatgccgttcggactgaagaatgccccttcagaatttcaaaaaattatgaacgatatttttaatccctattcaaaatttgtcattgtctacatagatgatgttttaatcttttcccaaaacattgaccaacatttcaaacatctccaaacattcatacatatcatcaaacaaaatggtttggcagtctccaaatcaaaaatcaatcttttccaaactcgaattcgattccttggtcacaatatatatcaaggtacaatcattccaatcgaaaggtcaatagagtttgctagcaaattccccaaccaaatcttagacaaaacccagttacaaagatttctaggttgtctaaattacgtaggagaatttgtcccctatttaaataatattgtcaagccattacatgataggctgaagaaaaatccgcctccttggtctgacctccatacacaaacggttaaagaaatcaaagtcaaagtccagtccattaaatgtctgtatcttcctattccacaggcatttaaaattgtcgaaactgatgcttcagacataggttatggtggcatcctcaaacaaagagtccatggccaagatcatgtcattgcatatacatcaaaacattggaatcctgcacaattaaaatattcaactgttaaaaaagaagttttagcaattgttttgtgcatttccaaatttcaattggatttattaaaccaaaaatttttaatcagggttgattgtaaatcagccaaagatattttacaaaaagatgttaaaaaccttgcctcaaaacaaatttttgcacgatggcaagcaattttaagtgtctttgattttgacatagaatacatctagggcacctcaaattcactacctgactaccttacccgtgaattcttacagaaaagtggtaatgcctcctaaggcatcgggaatctccctacgaggaggaaggagtacaggcaaaggagccaggctggctcttccagagccaaccatcaagaaatcatctacctcttctgggtcaccatcccaggctgggtcatctacccagaaaaccaatttagaagggtcatcaacccaga

SEQ ID NO: 15617 - DNA, 1095 bp, Glycine max; identical to SEQ ID NO: 15616
  Gm_smallRNAprecursor_8450

SEQ ID NO: 15618 - DNA, 1095 bp, Glycine max; identical to SEQ ID NO: 15616
  Gm_smallRNAprecursor_8451

SEQ ID NO: 15619 - DNA, 1095 bp, Glycine max; identical to SEQ ID NO: 15616
  Gm_smallRNAprecursor_8452

SEQ ID NO: 15620 - DNA, 1035 bp, Glycine max
  Gm_smallRNAprecursor_8453
attgtctacatagatgatgttttaatcttttcccaaaacattgaccaacatttcaaacatctccaaacattcatacatatcatcaaacaaaatggtttggcagtctccaaatcaaaaatcaatcttttccaaactcgaattcgattccttggtcacaatatatatcaaggtacaatcattccaatcgaaaggtcaatagagtttgctagcaaattccccaaccaaatcttagacaaaacccagttacaaagatttctaggttgtctaaattacgtaggagaatttgtcccctatttaaataatattgtcaagccattacatgataggctgaagaaaaatccgcctccttggtctgacctccatacacaaacggttaaagaaatcaaagtcaaagtccagtccattaaatgtctgtatcttcctattccacaggcatttaaaattgtcgaaactgatgcttcagacataggttatggtggcatcctcaaacaaagagtccatggccaagatcatgtcattgcatatacatcaaaacattggaatcctgcacaattaaaatattcaactgttaaaaaagaagttttagcaattgttttgtgcatttccaaatttcaattggatttattaaaccaaaaatttttaatcagggttgattgtaaatcagccaaagatattttacaaaaagatgttaaaaaccttgcctcaaaacaaatttttgcacgatggcaagcaattttaagtgtctttgattttgacatagaatacatctagggcacctcaaattcactacctgactaccttacccgtgaattcttacagaaaagtggtaatgcctcctaaggcatcgggaatctccctacgaggaggaaggagtacaggcaaaggagccaggctggctcttccagagccaaccatcaagaaatcatctacctcttctgggtcaccatcccaggctgggtcatctacccagaaaaccaatttagaagggtcatcaacccagattgcctcaatcaaacccgagccatccactcagga

SEQ ID NO: 15621 - DNA, 1035 bp, Glycine max; identical to SEQ ID NO: 15620
  Gm_smallRNAprecursor_8454

SEQ ID NO: 15622 - DNA, 1091 bp, Glycine max
  Gm_smallRNAprecursor_8455
caattttaagtgtctttgattttgacatagaatacatctagggcacctcaaattcactacctgactaccttacccgtgaattcttacagaaaagtggtaatgcctcctaaggcatcgggaatctccctacgaggaggaaggagtacaggcaaaggagccaggctggctcttccagagccaaccatcaagaaatcatctacctcttctgggtcaccatcccaggctgggtcatctacccagaaaaccaatttagaagggtcatcaacccagattgcctcaatcaaacccgagccatccactcaggaatctcccaaaccgacaaccgccaaacaaacatcggccgactatgcatggccaattgaaacccttcaggcccttcaagacatgggtctgaccaaatttccaaaaataatcaaaaaatcttgggcagacattgcctcagaatctgatgatgaatctgaatcaaatttacaaacaatgatccaaaatgcgtcaatgaccaaaacagccaccaatactaaaggaaaactacctttagccaaagctcaaacaccacctaccaaacaaactaacaattatatttataaaaataaattgttaactgttttgcagatggaacctgaattttgggacaaaaatcccttcaaggcgacggccaaggctttcccaccaggatttcactacaaaccaaccaccatcctgaagacaagaactttttatgaattgattttggtagattcaaactcagtatctatcaaacatttcaaagatccaaaagaccaaaccttaaacacccactcaaccatccaaatactaaaagttcttcaaccgagacactttggttcggacttgaacaaaggaaagagattttcagttccatttgatccggtaggttatacctattgggattacgttgatgcttggactaaggtgttttggcaccaaaatacccgcttcaagcattcatggttgatatatttcaagaccaacacaatttacaattttcccaattggtttttgcaatggtgggacttctttggaccaatcccagagatattcccagaaacggtccaacaaggattttcccaatt

SEQ ID NO: 15623 - DNA, 1192 bp, Glycine max
  Gm_smallRNAprecursor_8456
aaagtggtaatgcctcctaaggcatcgggaatctccctacgaggaggaaggagtacaggcaaaggagccaggctggctcttccagagccaaccatcaagaaatcatctacctcttctgggtcaccatcccaggctgggtcatctacccagaaaaccaatttagaagggtcatcaacccagattgcctcaatcaaacccgagccatccactcaggaatctcccaaaccgacaaccgccaaacaaacatcggccgactatgcatggccaattgaaacccttcaggcccttcaagacatgggtctgaccaaatttccaaaaataatcaaaaaatcttgggcagacattgcctcagaatctgatgatgaatctgaatcaaatttacaaacaatgatccaaaatgcgtcaatgaccaaaacagccaccaatactaaaggaaaactacctttagccaaagctcaaacaccacctaccaaacaaactaacaattatatttataaaaataaattgttaactgttttgcagatggaacctgaattttgggacaaaaatcccttcaaggcgacggccaaggctttcccaccaggatttcactacaaaccaaccaccatcctgaagacaagaactttttatgaattgattttggtagattcaaactcagtatctatcaaacatttcaaagatccaaaagaccaaaccttaaacacccactcaaccatccaaatactaaaagttcttcaaccgagacactttggttcggacttgaacaaaggaaagagattttcagttccatttgatccggtaggttatacctattgggattacgttgatgcttggactaaggtgttttggcaccaaaatacccgcttcaagcattcatggttgatatatttcaagaccaacacaatttacaattttcccaattggtttttgcaatggtgggacttctttggaccaatcccagagatattcccagaaacggtccaacaaggattttcccaatttaagaaacaatacaattcgcaggaatcacgaattccagcagatcttaaatacttttcaagctttgcactgtcatggatattctcatggcaatatcgttacagcaagactgaaaagacaaaccaatatccatcactacaaagacacgcatttgtaaaatggtggacacaatttgactcatccaaagcggatc

SEQ ID NO: 15624 - DNA, 1099 bp, Glycine max
  Gm_smallRNAprecursor_8457
gtaatgcctcctaaggcatcgggaatctccctacgaggaggaaggagtacaggcaaaggagccaggctggctcttccagagccaaccatcaagaaatcatctacctcttctgggtcaccatcccaggctgggtcatctacccagaaaaccaatttagaagggtcatcaacccagattgcctcaatcaaacccgagccatccactcaggaatctcccaaaccgacaaccgccaaacaaacatcggccgactatgcatggccaattgaaacccttcaggcccttcaagacatgggtctgaccaaatttccaaaaataatcaaaaaatcttgggcagacattgcctcagaatctgatgatgaatctgaatcaaatttacaaacaatgatccaaaatgcgtcaatgaccaaaacagccaccaatactaaaggaaaactacctttagccaaagctcaaacaccacctaccaaacaaactaacaattatatttataaaaataaattgttaactgttttgcagatggaacctgaattttgggacaaaaatcccttcaaggcgacggccaaggctttcccaccaggatttcactacaaaccaaccaccatcctgaagacaagaactttttatgaattgattttggtagattcaaactcagtatctatcaaacatttcaaagatccaaaagaccaaaccttaaacacccactcaaccatccaaatactaaaagttcttcaaccgagacactttggttcggacttgaacaaaggaaagagattttcagttccatttgatccggtaggttatacctattgggattacgttgatgcttggactaaggtgttttggcaccaaaatacccgcttcaagcattcatggttgatatatttcaagaccaacacaatttacaattttcccaattggtttttgcaatggtgggacttctttggaccaatcccagagatattcccagaaacggtccaacaaggattttcccaatttaagaaacaatacaattcgcaggaatcacgaattccagcagatcttaaatacttttcaagctttgcactgtcatggatattctcatggcaatatcgttacagca

SEQ ID NO: 15625 - DNA, 1158 bp, Glycine max
  Gm_smallRNAprecursor_8458
ctaaggcatcgggaatctccctacgaggaggaaggagtacaggcaaaggagccaggctggctcttccagagccaaccatcaagaaatcatctacctcttctgggtcaccatcccaggctgggtcatctacccagaaaaccaatttagaagggtcatcaacccagattgcctcaatcaaacccgagccatccactcaggaatctcccaaaccgacaaccgccaaacaaacatcggccgactatgcatggccaattgaaacccttcaggcccttcaagacatgggtctgaccaaatttccaaaaataatcaaaaaatcttgggcagacattgcctcagaatctgatgatgaatctgaatcaaatttacaaacaatgatccaaaatgcgtcaatgaccaaaacagccaccaatactaaaggaaaactacctttagccaaagctcaaacaccacctaccaaacaaactaacaattatatttataaaaataaattgttaactgttttgcagatggaacctgaattttgggacaaaaatcccttcaaggcgacggccaaggctttcccaccaggatttcactacaaaccaaccaccatcctgaagacaagaactttttatgaattgattttggtagattcaaactcagtatctatcaaacatttcaaagatccaaaagaccaaaccttaaacacccactcaaccatccaaatactaaaagttcttcaaccgagacactttggttcggacttgaacaaaggaaagagattttcagttccatttgatccggtaggttatacctattgggattacgttgatgcttggactaaggtgttttggcaccaaaatacccgcttcaagcattcatggttgatatatttcaagaccaacacaatttacaattttcccaattggtttttgcaatggtgggacttctttggaccaatcccagagatattcccagaaacggtccaacaaggattttcccaatttaagaaacaatacaattcgcaggaatcacgaattccagcagatcttaaatacttttcaagctttgcactgtcatggatattctcatggcaatatcgttacagcaagactgaaaagacaaaccaatatccatcactacaaagacacgcatttgtaaaatggtggacacaatttg

SEQ ID NO: 15626 - DNA, 1167 bp, Glycine max
  Gm_smallRNAprecursor_8459
ctaaggcatcgggaatctccctacgaggaggaaggagtacaggcaaaggagccaggctggctcttccagagccaaccatcaagaaatcatctacctcttctgggtcaccatcccaggctgggtcatctacccagaaaaccaatttagaagggtcatcaacccagattgcctcaatcaaacccgagccatccactcaggaatctcccaaaccgacaaccgccaaacaaacatcggccgactatgcatggccaattgaaacccttcaggcccttcaagacatgggtctgaccaaatttccaaaaataatcaaaaaatcttgggcagacattgcctcagaatctgatgatgaatctgaatcaaatttacaaacaatgatccaaaatgcgtcaatgaccaaaacagccaccaatactaaaggaaaactacctttagccaaagctcaaacaccacctaccaaacaaactaacaattatatttataaaaataaattgttaactgttttgcagatggaacctgaattttgggacaaaaatcccttcaaggcgacggccaaggctttcccaccaggatttcactacaaaccaaccaccatcctgaagacaagaactttttatgaattgattttggtagattcaaactcagtatctatcaaacatttcaaagatccaaaagaccaaaccttaaacacccactcaaccatccaaatactaaaagttcttcaaccgagacactttggttcggacttgaacaaaggaaagagattttcagttccatttgatccggtaggttatacctattgggattacgttgatgcttggactaaggtgttttggcaccaaaatacccgcttcaagcattcatggttgatatatttcaagaccaacacaatttacaattttcccaattggtttttgcaatggtgggacttctttggaccaatcccagagatattcccagaaacggtccaacaaggattttcccaatttaagaaacaatacaattcgcaggaatcacgaattccagcagatcttaaatacttttcaagctttgcactgtcatggatattctcatggcaatatcgttacagcaagactgaaaagacaaaccaatatccatcactacaaagacacgcatttgtaaaatggtggacacaatttgactcatcca

SEQ ID NO: 15627 - DNA, 1098 bp, Glycine max
  Gm_smallRNAprecursor_8460
ggaatctccctacgaggaggaaggagtacaggcaaaggagccaggctggctcttccagagccaaccatcaagaaatcatctacctcttctgggtcaccatcccaggctgggtcatctacccagaaaaccaatttagaagggtcatcaacccagattgcctcaatcaaacccgagccatccactcaggaatctcccaaaccgacaaccgccaaacaaacatcggccgactatgcatggccaattgaaacccttcaggcccttcaagacatgggtctgaccaaatttccaaaaataatcaaaaaatcttgggcagacattgcctcagaatctgatgatgaatctgaatcaaatttacaaacaatgatccaaaatgcgtcaatgaccaaaacagccaccaatactaaaggaaaactacctttagccaaagctcaaacaccacctaccaaacaaactaacaattatatttataaaaataaattgttaactgttttgcagatggaacctgaattttgggacaaaaatcccttcaaggcgacggccaaggctttcccaccaggatttcactacaaaccaaccaccatcctgaagacaagaactttttatgaattgattttggtagattcaaactcagtatctatcaaacatttcaaagatccaaaagaccaaaccttaaacacccactcaaccatccaaatactaaaagttcttcaaccgagacactttggttcggacttgaacaaaggaaagagattttcagttccatttgatccggtaggttatacctattgggattacgttgatgcttggactaaggtgttttggcaccaaaatacccgcttcaagcattcatggttgatatatttcaagaccaacacaatttacaattttcccaattggtttttgcaatggtgggacttctttggaccaatcccagagatattcccagaaacggtccaacaaggattttcccaatttaagaaacaatacaattcgcaggaatcacgaattccagcagatcttaaatacttttcaagctttgcactgtcatggatattctcatggcaatatcgttacagcaagactgaaaagacaaaccaa

SEQ ID NO: 15628 - DNA, 1190 bp, Glycine max
  Gm_smallRNAprecursor_8461
acaggcaaaggagccaggctggctcttccagagccaaccatcaagaaatcatctacctcttctgggtcaccatcccaggctgggtcatctacccagaaaaccaatttagaagggtcatcaacccagattgcctcaatcaaacccgagccatccactcaggaatctcccaaaccgacaaccgccaaacaaacatcggccgactatgcatggccaattgaaacccttcaggcccttcaagacatgggtctgaccaaatttccaaaaataatcaaaaaatcttgggcagacattgcctcagaatctgatgatgaatctgaatcaaatttacaaacaatgatccaaaatgcgtcaatgaccaaaacagccaccaatactaaaggaaaactacctttagccaaagctcaaacaccacctaccaaacaaactaacaattatatttataaaaataaattgttaactgttttgcagatggaacctgaattttgggacaaaaatcccttcaaggcgacggccaaggctttcccaccaggatttcactacaaaccaaccaccatcctgaagacaagaactttttatgaattgattttggtagattcaaactcagtatctatcaaacatttcaaagatccaaaagaccaaaccttaaacacccactcaaccatccaaatactaaaagttcttcaaccgagacactttggttcggacttgaacaaaggaaagagattttcagttccatttgatccggtaggttatacctattgggattacgttgatgcttggactaaggtgttttggcaccaaaatacccgcttcaagcattcatggttgatatatttcaagaccaacacaatttacaattttcccaattggtttttgcaatggtgggacttctttggaccaatcccagagatattcccagaaacggtccaacaaggattttcccaatttaagaaacaatacaattcgcaggaatcacgaattccagcagatcttaaatacttttcaagctttgcactgtcatggatattctcatggcaatatcgttacagcaagactgaaaagacaaaccaatatccatcactacaaagacacgcatttgtaaaatggtggacacaatttgactcatccaaagcggatccagaacaagtaaaactatggttccaatcccatccagaattcctcaaggcagc

SEQ ID NO: 15629 - DNA, 1148 bp, Glycine max
  Gm_smallRNAprecursor_8462
tgcctcaatcaaacccgagccatccactcaggaatctcccaaaccgacaaccgccaaacaaacatcggccgactatgcatggccaattgaaacccttcaggcccttcaagacatgggtctgaccaaatttccaaaaataatcaaaaaatcttgggcagacattgcctcagaatctgatgatgaatctgaatcaaatttacaaacaatgatccaaaatgcgtcaatgaccaaaacagccaccaatactaaaggaaaactacctttagccaaagctcaaacaccacctaccaaacaaactaacaattatatttataaaaataaattgttaactgttttgcagatggaacctgaattttgggacaaaaatcccttcaaggcgacggccaaggctttcccaccaggatttcactacaaaccaaccaccatcctgaagacaagaactttttatgaattgattttggtagattcaaactcagtatctatcaaacatttcaaagatccaaaagaccaaaccttaaacacccactcaaccatccaaatactaaaagttcttcaaccgagacactttggttcggacttgaacaaaggaaagagattttcagttccatttgatccggtaggttatacctattgggattacgttgatgcttggactaaggtgttttggcaccaaaatacccgcttcaagcattcatggttgatatatttcaagaccaacacaatttacaattttcccaattggtttttgcaatggtgggacttctttggaccaatcccagagatattcccagaaacggtccaacaaggattttcccaatttaagaaacaatacaattcgcaggaatcacgaattccagcagatcttaaatacttttcaagctttgcactgtcatggatattctcatggcaatatcgttacagcaagactgaaaagacaaaccaatatccatcactacaaagacacgcatttgtaaaatggtggacacaatttgactcatccaaagcggatccagaacaagtaaaactatggttccaatcccatccagaattcctcaaggcagctgatccagagacttctgtgtttttgaaccaaaagtctcatctggcagcatttttagcaggatcgacatcaaaggaggtcttagcta

SEQ ID NO: 15630 - DNA, 1149 bp, Glycine max
  Gm_smallRNAprecursor_8463
tgcctcaatcaaacccgagccatccactcaggaatctcccaaaccgacaaccgccaaacaaacatcggccgactatgcatggccaattgaaacccttcaggcccttcaagacatgggtctgaccaaatttccaaaaataatcaaaaaatcttgggcagacattgcctcagaatctgatgatgaatctgaatcaaatttacaaacaatgatccaaaatgcgtcaatgaccaaaacagccaccaatactaaaggaaaactacctttagccaaagctcaaacaccacctaccaaacaaactaacaattatatttataaaaataaattgttaactgttttgcagatggaacctgaattttgggacaaaaatcccttcaaggcgacggccaaggctttcccaccaggatttcactacaaaccaaccaccatcctgaagacaagaactttttatgaattgattttggtagattcaaactcagtatctatcaaacatttcaaagatccaaaagaccaaaccttaaacacccactcaaccatccaaatactaaaagttcttcaaccgagacactttggttcggacttgaacaaaggaaagagattttcagttccatttgatccggtaggttatacctattgggattacgttgatgcttggactaaggtgttttggcaccaaaatacccgcttcaagcattcatggttgatatatttcaagaccaacacaatttacaattttcccaattggtttttgcaatggtgggacttctttggaccaatcccagagatattcccagaaacggtccaacaaggattttcccaatttaagaaacaatacaattcgcaggaatcacgaattccagcagatcttaaatacttttcaagctttgcactgtcatggatattctcatggcaatatcgttacagcaagactgaaaagacaaaccaatatccatcactacaaagacacgcatttgtaaaatggtggacacaatttgactcatccaaagcggatccagaacaagtaaaactatggttccaatcccatccagaattcctcaaggcagctgatccagagacttctgtgtttttgaaccaaaagtctcatctggcagcatttttagcaggatcgacatcaaaggaggtcttagctaa

SEQ ID NO: 15631 - DNA, 1249 bp, Glycine max
  Gm_smallRNAprecursor_8464
tgcctcaatcaaacccgagccatccactcaggaatctcccaaaccgacaaccgccaaacaaacatcggccgactatgcatggccaattgaaacccttcaggcccttcaagacatgggtctgaccaaatttccaaaaataatcaaaaaatcttgggcagacattgcctcagaatctgatgatgaatctgaatcaaatttacaaacaatgatccaaaatgcgtcaatgaccaaaacagccaccaatactaaaggaaaactacctttagccaaagctcaaacaccacctaccaaacaaactaacaattatatttataaaaataaattgttaactgttttgcagatggaacctgaattttgggacaaaaatcccttcaaggcgacggccaaggctttcccaccaggatttcactacaaaccaaccaccatcctgaagacaagaactttttatgaattgattttggtagattcaaactcagtatctatcaaacatttcaaagatccaaaagaccaaaccttaaacacccactcaaccatccaaatactaaaagttcttcaaccgagacactttggttcggacttgaacaaaggaaagagattttcagttccatttgatccggtaggttatacctattgggattacgttgatgcttggactaaggtgttttggcaccaaaatacccgcttcaagcattcatggttgatatatttcaagaccaacacaatttacaattttcccaattggtttttgcaatggtgggacttctttggaccaatcccagagatattcccagaaacggtccaacaaggattttcccaatttaagaaacaatacaattcgcaggaatcacgaattccagcagatcttaaatacttttcaagctttgcactgtcatggatattctcatggcaatatcgttacagcaagactgaaaagacaaaccaatatccatcactacaaagacacgcatttgtaaaatggtggacacaatttgactcatccaaagcggatccagaacaagtaaaactatggttccaatcccatccagaattcctcaaggcagctgatccagagacttctgtgtttttgaaccaaaagtctcatctggcagcatttttagcaggatcgacatcaaaggaggtcttagctaaaaatctgaaggaagttctacaaatgttacaacaggaagaagaagcttcatcctcaaagaaggaagaaacaagttctgctgaagaagacgaagaagatccc

SEQ ID NO: 15632 - DNA, 1134 bp, Glycine max
  Gm_smallRNAprecursor_8465
caaacccgagccatccactcaggaatctcccaaaccgacaaccgccaaacaaacatcggccgactatgcatggccaattgaaacccttcaggcccttcaagacatgggtctgaccaaatttccaaaaataatcaaaaaatcttgggcagacattgcctcagaatctgatgatgaatctgaatcaaatttacaaacaatgatccaaaatgcgtcaatgaccaaaacagccaccaatactaaaggaaaactacctttagccaaagctcaaacaccacctaccaaacaaactaacaattatatttataaaaataaattgttaactgttttgcagatggaacctgaattttgggacaaaaatcccttcaaggcgacggccaaggctttcccaccaggatttcactacaaaccaaccaccatcctgaagacaagaactttttatgaattgattttggtagattcaaactcagtatctatcaaacatttcaaagatccaaaagaccaaaccttaaacacccactcaaccatccaaatactaaaagttcttcaaccgagacactttggttcggacttgaacaaaggaaagagattttcagttccatttgatccggtaggttatacctattgggattacgttgatgcttggactaaggtgttttggcaccaaaatacccgcttcaagcattcatggttgatatatttcaagaccaacacaatttacaattttcccaattggtttttgcaatggtgggacttctttggaccaatcccagagatattcccagaaacggtccaacaaggattttcccaatttaagaaacaatacaattcgcaggaatcacgaattccagcagatcttaaatacttttcaagctttgcactgtcatggatattctcatggcaatatcgttacagcaagactgaaaagacaaaccaatatccatcactacaaagacacgcatttgtaaaatggtggacacaatttgactcatccaaagcggatccagaacaagtaaaactatggttccaatcccatccagaattcctcaaggcagctgatccagagacttctgtgtttttgaaccaaaagtctcatctggcagcatttttagcaggatcgacatcaaaggaggtctt

SEQ ID NO: 15633 - DNA, 1087 bp, Glycine max
  Gm_smallRNAprecursor_8466
agccatccactcaggaatctcccaaaccgacaaccgccaaacaaacatcggccgactatgcatggccaattgaaacccttcaggcccttcaagacatgggtctgaccaaatttccaaaaataatcaaaaaatcttgggcagacattgcctcagaatctgatgatgaatctgaatcaaatttacaaacaatgatccaaaatgcgtcaatgaccaaaacagccaccaatactaaaggaaaactacctttagccaaagctcaaacaccacctaccaaacaaactaacaattatatttataaaaataaattgttaactgttttgcagatggaacctgaattttgggacaaaaatcccttcaaggcgacggccaaggctttcccaccaggatttcactacaaaccaaccaccatcctgaagacaagaactttttatgaattgattttggtagattcaaactcagtatctatcaaacatttcaaagatccaaaagaccaaaccttaaacacccactcaaccatccaaatactaaaagttcttcaaccgagacactttggttcggacttgaacaaaggaaagagattttcagttccatttgatccggtaggttatacctattgggattacgttgatgcttggactaaggtgttttggcaccaaaatacccgcttcaagcattcatggttgatatatttcaagaccaacacaatttacaattttcccaattggtttttgcaatggtgggacttctttggaccaatcccagagatattcccagaaacggtccaacaaggattttcccaatttaagaaacaatacaattcgcaggaatcacgaattccagcagatcttaaatacttttcaagctttgcactgtcatggatattctcatggcaatatcgttacagcaagactgaaaagacaaaccaatatccatcactacaaagacacgcatttgtaaaatggtggacacaatttgactcatccaaagcggatccagaacaagtaaaactatggttccaatcccatccagaattcctcaaggcagctgatccagagacttctgtgtttttgaaccaaaagtctcatct

SEQ ID NO: 15634 - DNA, 1090 bp, Glycine max
  Gm_smallRNAprecursor_8467
agccatccactcaggaatctcccaaaccgacaaccgccaaacaaacatcggccgactatgcatggccaattgaaacccttcaggcccttcaagacatgggtctgaccaaatttccaaaaataatcaaaaaatcttgggcagacattgcctcagaatctgatgatgaatctgaatcaaatttacaaacaatgatccaaaatgcgtcaatgaccaaaacagccaccaatactaaaggaaaactacctttagccaaagctcaaacaccacctaccaaacaaactaacaattatatttataaaaataaattgttaactgttttgcagatggaacctgaattttgggacaaaaatcccttcaaggcgacggccaaggctttcccaccaggatttcactacaaaccaaccaccatcctgaagacaagaactttttatgaattgattttggtagattcaaactcagtatctatcaaacatttcaaagatccaaaagaccaaaccttaaacacccactcaaccatccaaatactaaaagttcttcaaccgagacactttggttcggacttgaacaaaggaaagagattttcagttccatttgatccggtaggttatacctattgggattacgttgatgcttggactaaggtgttttggcaccaaaatacccgcttcaagcattcatggttgatatatttcaagaccaacacaatttacaattttcccaattggtttttgcaatggtgggacttctttggaccaatcccagagatattcccagaaacggtccaacaaggattttcccaatttaagaaacaatacaattcgcaggaatcacgaattccagcagatcttaaatacttttcaagctttgcactgtcatggatattctcatggcaatatcgttacagcaagactgaaaagacaaaccaatatccatcactacaaagacacgcatttgtaaaatggtggacacaatttgactcatccaaagcggatccagaacaagtaaaactatggttccaatcccatccagaattcctcaaggcagctgatccagagacttctgtgtttttgaaccaaaagtctcatctggc

SEQ ID NO: 15635 - DNA, 1129 bp, Glycine max
  Gm_smallRNAprecursor_8468
agccatccactcaggaatctcccaaaccgacaaccgccaaacaaacatcggccgactatgcatggccaattgaaacccttcaggcccttcaagacatgggtctgaccaaatttccaaaaataatcaaaaaatcttgggcagacattgcctcagaatctgatgatgaatctgaatcaaatttacaaacaatgatccaaaatgcgtcaatgaccaaaacagccaccaatactaaaggaaaactacctttagccaaagctcaaacaccacctaccaaacaaactaacaattatatttataaaaataaattgttaactgttttgcagatggaacctgaattttgggacaaaaatcccttcaaggcgacggccaaggctttcccaccaggatttcactacaaaccaaccaccatcctgaagacaagaactttttatgaattgattttggtagattcaaactcagtatctatcaaacatttcaaagatccaaaagaccaaaccttaaacacccactcaaccatccaaatactaaaagttcttcaaccgagacactttggttcggacttgaacaaaggaaagagattttcagttccatttgatccggtaggttatacctattgggattacgttgatgcttggactaaggtgttttggcaccaaaatacccgcttcaagcattcatggttgatatatttcaagaccaacacaatttacaattttcccaattggtttttgcaatggtgggacttctttggaccaatcccagagatattcccagaaacggtccaacaaggattttcccaatttaagaaacaatacaattcgcaggaatcacgaattccagcagatcttaaatacttttcaagctttgcactgtcatggatattctcatggcaatatcgttacagcaagactgaaaagacaaaccaatatccatcactacaaagacacgcatttgtaaaatggtggacacaatttgactcatccaaagcggatccagaacaagtaaaactatggttccaatcccatccagaattcctcaaggcagctgatccagagacttctgtgtttttgaaccaaaagtctcatctggcagcatttttagcaggatcgacatcaaaggaggtcttagc

SEQ ID NO: 15636 - DNA, 1244 bp, Glycine max
  Gm_smallRNAprecursor_8469
caagacatgggtctgaccaaatttccaaaaataatcaaaaaatcttgggcagacattgcctcagaatctgatgatgaatctgaatcaaatttacaaacaatgatccaaaatgcgtcaatgaccaaaacagccaccaatactaaaggaaaactacctttagccaaagctcaaacaccacctaccaaacaaactaacaattatatttataaaaataaattgttaactgttttgcagatggaacctgaattttgggacaaaaatcccttcaaggcgacggccaaggctttcccaccaggatttcactacaaaccaaccaccatcctgaagacaagaactttttatgaattgattttggtagattcaaactcagtatctatcaaacatttcaaagatccaaaagaccaaaccttaaacacccactcaaccatccaaatactaaaagttcttcaaccgagacactttggttcggacttgaacaaaggaaagagattttcagttccatttgatccggtaggttatacctattgggattacgttgatgcttggactaaggtgttttggcaccaaaatacccgcttcaagcattcatggttgatatatttcaagaccaacacaatttacaattttcccaattggtttttgcaatggtgggacttctttggaccaatcccagagatattcccagaaacggtccaacaaggattttcccaatttaagaaacaatacaattcgcaggaatcacgaattccagcagatcttaaatacttttcaagctttgcactgtcatggatattctcatggcaatatcgttacagcaagactgaaaagacaaaccaatatccatcactacaaagacacgcatttgtaaaatggtggacacaatttgactcatccaaagcggatccagaacaagtaaaactatggttccaatcccatccagaattcctcaaggcagctgatccagagacttctgtgtttttgaaccaaaagtctcatctggcagcatttttagcaggatcgacatcaaaggaggtcttagctaaaaatctgaaggaagttctacaaatgttacaacaggaagaagaagcttcatcctcaaagaaggaagaaacaagttctgctgaagaagacgaagaagatcccttttaccaaaacgaagattattgttttggtatctgtttagattaaatttaatttcggtcacaaaaccgtctgtttgtaattaatgtgtaattaatgctgga

SEQ ID NO: 15637 - DNA, 1080 bp, Glycine max
  Gm_smallRNAprecursor_8470
ccaaaaataatcaaaaaatcttgggcagacattgcctcagaatctgatgatgaatctgaatcaaatttacaaacaatgatccaaaatgcgtcaatgaccaaaacagccaccaatactaaaggaaaactacctttagccaaagctcaaacaccacctaccaaacaaactaacaattatatttataaaaataaattgttaactgttttgcagatggaacctgaattttgggacaaaaatcccttcaaggcgacggccaaggctttcccaccaggatttcactacaaaccaaccaccatcctgaagacaagaactttttatgaattgattttggtagattcaaactcagtatctatcaaacatttcaaagatccaaaagaccaaaccttaaacacccactcaaccatccaaatactaaaagttcttcaaccgagacactttggttcggacttgaacaaaggaaagagattttcagttccatttgatccggtaggttatacctattgggattacgttgatgcttggactaaggtgttttggcaccaaaatacccgcttcaagcattcatggttgatatatttcaagaccaacacaatttacaattttcccaattggtttttgcaatggtgggacttctttggaccaatcccagagatattcccagaaacggtccaacaaggattttcccaatttaagaaacaatacaattcgcaggaatcacgaattccagcagatcttaaatacttttcaagctttgcactgtcatggatattctcatggcaatatcgttacagcaagactgaaaagacaaaccaatatccatcactacaaagacacgcatttgtaaaatggtggacacaatttgactcatccaaagcggatccagaacaagtaaaactatggttccaatcccatccagaattcctcaaggcagctgatccagagacttctgtgtttttgaaccaaaagtctcatctggcagcatttttagcaggatcgacatcaaaggaggtcttagctaaaaatctgaaggaagttctacaaatgttacaacaggaagaagaagcttcatcctcaaagaag

SEQ ID NO: 15638 - DNA, 1062 bp, Glycine max
  Gm_smallRNAprecursor_8471
tcttgggcagacattgcctcagaatctgatgatgaatctgaatcaaatttacaaacaatgatccaaaatgcgtcaatgaccaaaacagccaccaatactaaaggaaaactacctttagccaaagctcaaacaccacctaccaaacaaactaacaattatatttataaaaataaattgttaactgttttgcagatggaacctgaattttgggacaaaaatcccttcaaggcgacggccaaggctttcccaccaggatttcactacaaaccaaccaccatcctgaagacaagaactttttatgaattgattttggtagattcaaactcagtatctatcaaacatttcaaagatccaaaagaccaaaccttaaacacccactcaaccatccaaatactaaaagttcttcaaccgagacactttggttcggacttgaacaaaggaaagagattttcagttccatttgatccggtaggttatacctattgggattacgttgatgcttggactaaggtgttttggcaccaaaatacccgcttcaagcattcatggttgatatatttcaagaccaacacaatttacaattttcccaattggtttttgcaatggtgggacttctttggaccaatcccagagatattcccagaaacggtccaacaaggattttcccaatttaagaaacaatacaattcgcaggaatcacgaattccagcagatcttaaatacttttcaagctttgcactgtcatggatattctcatggcaatatcgttacagcaagactgaaaagacaaaccaatatccatcactacaaagacacgcatttgtaaaatggtggacacaatttgactcatccaaagcggatccagaacaagtaaaactatggttccaatcccatccagaattcctcaaggcagctgatccagagacttctgtgtttttgaaccaaaagtctcatctggcagcatttttagcaggatcgacatcaaaggaggtcttagctaaaaatctgaaggaagttctacaaatgttacaacaggaagaagaagcttcatcctcaaagaag

SEQ ID NO: 15639 - DNA, 1146 bp, Glycine max
  Gm_smallRNAprecursor_8472
aatgatccaaaatgcgtcaatgaccaaaacagccaccaatactaaaggaaaactacctttagccaaagctcaaacaccacctaccaaacaaactaacaattatatttataaaaataaattgttaactgttttgcagatggaacctgaattttgggacaaaaatcccttcaaggcgacggccaaggctttcccaccaggatttcactacaaaccaaccaccatcctgaagacaagaactttttatgaattgattttggtagattcaaactcagtatctatcaaacatttcaaagatccaaaagaccaaaccttaaacacccactcaaccatccaaatactaaaagttcttcaaccgagacactttggttcggacttgaacaaaggaaagagattttcagttccatttgatccggtaggttatacctattgggattacgttgatgcttggactaaggtgttttggcaccaaaatacccgcttcaagcattcatggttgatatatttcaagaccaacacaatttacaattttcccaattggtttttgcaatggtgggacttctttggaccaatcccagagatattcccagaaacggtccaacaaggattttcccaatttaagaaacaatacaattcgcaggaatcacgaattccagcagatcttaaatacttttcaagctttgcactgtcatggatattctcatggcaatatcgttacagcaagactgaaaagacaaaccaatatccatcactacaaagacacgcatttgtaaaatggtggacacaatttgactcatccaaagcggatccagaacaagtaaaactatggttccaatcccatccagaattcctcaaggcagctgatccagagacttctgtgtttttgaaccaaaagtctcatctggcagcatttttagcaggatcgacatcaaaggaggtcttagctaaaaatctgaaggaagttctacaaatgttacaacaggaagaagaagcttcatcctcaaagaaggaagaaacaagttctgctgaagaagacgaagaagatcccttttaccaaaacgaagattattgttttggtatctgtttagattaaatttaatttcggtcacaaaaccgtctgtttgtaattaatgtgtaattaatgctgga

SEQ ID NO: 15640 - DNA, 1058 bp, Glycine max
  Gm_smallRNAprecursor_8473
accttaaacacccactcaaccatccaaatactaaaagttcttcaaccgagacactttggttcggacttgaacaaaggaaagagattttcagttccatttgatccggtaggttatacctattgggattacgttgatgcttggactaaggtgttttggcaccaaaatacccgcttcaagcattcatggttgatatatttcaagaccaacacaatttacaattttcccaattggtttttgcaatggtgggacttctttggaccaatcccagagatattcccagaaacggtccaacaaggattttcccaatttaagaaacaatacaattcgcaggaatcacgaattccagcagatcttaaatacttttcaagctttgcactgtcatggatattctcatggcaatatcgttacagcaagactgaaaagacaaaccaatatccatcactacaaagacacgcatttgtaaaatggtggacacaatttgactcatccaaagcggatccagaacaagtaaaactatggttccaatcccatccagaattcctcaaggcagctgatccagagacttctgtgtttttgaaccaaaagtctcatctggcagcatttttagcaggatcgacatcaaaggaggtcttagctaaaaatctgaaggaagttctacaaatgttacaacaggaagaagaagcttcatcctcaaagaaggaagaaacaagttctgctgaagaagacgaagaagatcccttttaccaaaacgaagattattgttttggtatctgtttagattaaatttaatttcggtcacaaaaccgtctgtttgtaattaatgtgtaattaatgctggacaatactacctgtcctgtagccattaaagtcccggtcaaaactacttgtcttgtaacaaacagtcaaatagtcccggtaaaaactaccggcaactaccggtcttagattttttgctatataaggagtcctcaagtatgttgtgaggcaccctttcatttagccattttttcaggtttcggaagagaggtgctctgaaacaagatttttgtaagcgcttc

SEQ ID NO: 15641 - DNA, 1036 bp, Glycine max
  Gm_smallRNAprecursor_8474
tccaaatactaaaagttcttcaaccgagacactttggttcggacttgaacaaaggaaagagattttcagttccatttgatccggtaggttatacctattgggattacgttgatgcttggactaaggtgttttggcaccaaaatacccgcttcaagcattcatggttgatatatttcaagaccaacacaatttacaattttcccaattggtttttgcaatggtgggacttctttggaccaatcccagagatattcccagaaacggtccaacaaggattttcccaatttaagaaacaatacaattcgcaggaatcacgaattccagcagatcttaaatacttttcaagctttgcactgtcatggatattctcatggcaatatcgttacagcaagactgaaaagacaaaccaatatccatcactacaaagacacgcatttgtaaaatggtggacacaatttgactcatccaaagcggatccagaacaagtaaaactatggttccaatcccatccagaattcctcaaggcagctgatccagagacttctgtgtttttgaaccaaaagtctcatctggcagcatttttagcaggatcgacatcaaaggaggtcttagctaaaaatctgaaggaagttctacaaatgttacaacaggaagaagaagcttcatcctcaaagaaggaagaaacaagttctgctgaagaagacgaagaagatcccttttaccaaaacgaagattattgttttggtatctgtttagattaaatttaatttcggtcacaaaaccgtctgtttgtaattaatgtgtaattaatgctggacaatactacctgtcctgtagccattaaagtcccggtcaaaactacttgtcttgtaacaaacagtcaaatagtcccggtaaaaactaccggcaactaccggtcttagattttttgctatataaggagtcctcaagtatgttgtgaggcaccctttcatttagccattttttcaggtttcggaagagaggtgctctgaaacaagatttttgtaagcgcttc

SEQ ID NO: 15642 - DNA, 1031 bp, Glycine max
  Gm_smallRNAprecursor_8475
gacactttggttcggacttgaacaaaggaaagagattttcagttccatttgatccggtaggttatacctattgggattacgttgatgcttggactaaggtgttttggcaccaaaatacccgcttcaagcattcatggttgatatatttcaagaccaacacaatttacaattttcccaattggtttttgcaatggtgggacttctttggaccaatcccagagatattcccagaaacggtccaacaaggattttcccaatttaagaaacaatacaattcgcaggaatcacgaattccagcagatcttaaatacttttcaagctttgcactgtcatggatattctcatggcaatatcgttacagcaagactgaaaagacaaaccaatatccatcactacaaagacacgcatttgtaaaatggtggacacaatttgactcatccaaagcggatccagaacaagtaaaactatggttccaatcccatccagaattcctcaaggcagctgatccagagacttctgtgtttttgaaccaaaagtctcatctggcagcatttttagcaggatcgacatcaaaggaggtcttagctaaaaatctgaaggaagttctacaaatgttacaacaggaagaagaagcttcatcctcaaagaaggaagaaacaagttctgctgaagaagacgaagaagatcccttttaccaaaacgaagattattgttttggtatctgtttagattaaatttaatttcggtcacaaaaccgtctgtttgtaattaatgtgtaattaatgctggacaatactacctgtcctgtagccattaaagtcccggtcaaaactacttgtcttgtaacaaacagtcaaatagtcccggtaaaaactaccggcaactaccggtcttagattttttgctatataaggagtcctcaagtatgttgtgaggcaccctttcatttagccattttttcaggtttcggaagagaggtgctctgaaacaagatttttgtaagcgcttctttctagattcaataaatttct

SEQ ID NO: 15643 - DNA, 1138 bp, Glycine max
  Gm_smallRNAprecursor_8476
ggttcggacttgaacaaaggaaagagattttcagttccatttgatccggtaggttatacctattgggattacgttgatgcttggactaaggtgttttggcaccaaaatacccgcttcaagcattcatggttgatatatttcaagaccaacacaatttacaattttcccaattggtttttgcaatggtgggacttctttggaccaatcccagagatattcccagaaacggtccaacaaggattttcccaatttaagaaacaatacaattcgcaggaatcacgaattccagcagatcttaaatacttttcaagctttgcactgtcatggatattctcatggcaatatcgttacagcaagactgaaaagacaaaccaatatccatcactacaaagacacgcatttgtaaaatggtggacacaatttgactcatccaaagcggatccagaacaagtaaaactatggttccaatcccatccagaattcctcaaggcagctgatccagagacttctgtgtttttgaaccaaaagtctcatctggcagcatttttagcaggatcgacatcaaaggaggtcttagctaaaaatctgaaggaagttctacaaatgttacaacaggaagaagaagcttcatcctcaaagaaggaagaaacaagttctgctgaagaagacgaagaagatcccttttaccaaaacgaagattattgttttggtatctgtttagattaaatttaatttcggtcacaaaaccgtctgtttgtaattaatgtgtaattaatgctggacaatactacctgtcctgtagccattaaagtcccggtcaaaactacttgtcttgtaacaaacagtcaaatagtcccggtaaaaactaccggcaactaccggtcttagattttttgctatataaggagtcctcaagtatgttgtgaggcaccctttcatttagccattttttcaggtttcggaagagaggtgctctgaaacaagatttttgtaagcgcttctttctagattcaataaatttctatttttcatccttctctcttctccctccaccgatcctgtgcggctctgccgccgcttcggtttctttgttttcaaaaacctgggtttgtaagccgtttcagtgtgcccttgatat

SEQ ID NO: 15644 - DNA, 1139 bp, Glycine max
  Gm_smallRNAprecursor_8477
ggttcggacttgaacaaaggaaagagattttcagttccatttgatccggtaggttatacctattgggattacgttgatgcttggactaaggtgttttggcaccaaaatacccgcttcaagcattcatggttgatatatttcaagaccaacacaatttacaattttcccaattggtttttgcaatggtgggacttctttggaccaatcccagagatattcccagaaacggtccaacaaggattttcccaatttaagaaacaatacaattcgcaggaatcacgaattccagcagatcttaaatacttttcaagctttgcactgtcatggatattctcatggcaatatcgttacagcaagactgaaaagacaaaccaatatccatcactacaaagacacgcatttgtaaaatggtggacacaatttgactcatccaaagcggatccagaacaagtaaaactatggttccaatcccatccagaattcctcaaggcagctgatccagagacttctgtgtttttgaaccaaaagtctcatctggcagcatttttagcaggatcgacatcaaaggaggtcttagctaaaaatctgaaggaagttctacaaatgttacaacaggaagaagaagcttcatcctcaaagaaggaagaaacaagttctgctgaagaagacgaagaagatcccttttaccaaaacgaagattattgttttggtatctgtttagattaaatttaatttcggtcacaaaaccgtctgtttgtaattaatgtgtaattaatgctggacaatactacctgtcctgtagccattaaagtcccggtcaaaactacttgtcttgtaacaaacagtcaaatagtcccggtaaaaactaccggcaactaccggtcttagattttttgctatataaggagtcctcaagtatgttgtgaggcaccctttcatttagccattttttcaggtttcggaagagaggtgctctgaaacaagatttttgtaagcgcttctttctagattcaataaatttctatttttcatccttctctcttctccctccaccgatcctgtgcggctctgccgccgcttcggtttctttgttttcaaaaacctgggtttgtaagccgtttcagtgtgcccttgatatt

SEQ ID NO: 15645 - DNA, 1141 bp, Glycine max
  Gm_smallRNAprecursor_8478
ggttcggacttgaacaaaggaaagagattttcagttccatttgatccggtaggttatacctattgggattacgttgatgcttggactaaggtgttttggcaccaaaatacccgcttcaagcattcatggttgatatatttcaagaccaacacaatttacaattttcccaattggtttttgcaatggtgggacttctttggaccaatcccagagatattcccagaaacggtccaacaaggattttcccaatttaagaaacaatacaattcgcaggaatcacgaattccagcagatcttaaatacttttcaagctttgcactgtcatggatattctcatggcaatatcgttacagcaagactgaaaagacaaaccaatatccatcactacaaagacacgcatttgtaaaatggtggacacaatttgactcatccaaagcggatccagaacaagtaaaactatggttccaatcccatccagaattcctcaaggcagctgatccagagacttctgtgtttttgaaccaaaagtctcatctggcagcatttttagcaggatcgacatcaaaggaggtcttagctaaaaatctgaaggaagttctacaaatgttacaacaggaagaagaagcttcatcctcaaagaaggaagaaacaagttctgctgaagaagacgaagaagatcccttttaccaaaacgaagattattgttttggtatctgtttagattaaatttaatttcggtcacaaaaccgtctgtttgtaattaatgtgtaattaatgctggacaatactacctgtcctgtagccattaaagtcccggtcaaaactacttgtcttgtaacaaacagtcaaatagtcccggtaaaaactaccggcaactaccggtcttagattttttgctatataaggagtcctcaagtatgttgtgaggcaccctttcatttagccattttttcaggtttcggaagagaggtgctctgaaacaagatttttgtaagcgcttctttctagattcaataaatttctatttttcatccttctctcttctccctccaccgatcctgtgcggctctgccgccgcttcggtttctttgttttcaaaaacctgggtttgtaagccgtttcagtgtgcccttgatatttg

SEQ ID NO: 15646 - DNA, 1198 bp, Glycine max
  Gm_smallRNAprecursor_8479
aacggtccaacaaggattttcccaatttaagaaacaatacaattcgcaggaatcacgaattccagcagatcttaaatacttttcaagctttgcactgtcatggatattctcatggcaatatcgttacagcaagactgaaaagacaaaccaatatccatcactacaaagacacgcatttgtaaaatggtggacacaatttgactcatccaaagcggatccagaacaagtaaaactatggttccaatcccatccagaattcctcaaggcagctgatccagagacttctgtgtttttgaaccaaaagtctcatctggcagcatttttagcaggatcgacatcaaaggaggtcttagctaaaaatctgaaggaagttctacaaatgttacaacaggaagaagaagcttcatcctcaaagaaggaagaaacaagttctgctgaagaagacgaagaagatcccttttaccaaaacgaagattattgttttggtatctgtttagattaaatttaatttcggtcacaaaaccgtctgtttgtaattaatgtgtaattaatgctggacaatactacctgtcctgtagccattaaagtcccggtcaaaactacttgtcttgtaacaaacagtcaaatagtcccggtaaaaactaccggcaactaccggtcttagattttttgctatataaggagtcctcaagtatgttgtgaggcaccctttcatttagccattttttcaggtttcggaagagaggtgctctgaaacaagatttttgtaagcgcttctttctagattcaataaatttctatttttcatccttctctcttctccctccaccgatcctgtgcggctctgccgccgcttcggtttctttgttttcaaaaacctgggtttgtaagccgtttcagtgtgcccttgatatttgctttacaagtttataattcttaagtttaattttatcatactgcattcttacttcctatctgtctgtttgatcttactccgctgatatatatatattgtgaagtatttttgctacatacatgcatatccaaggtatctttctacctaaacatacatatatatattttttgtgaggtatgactaccttccgagcttgtgcttgttttatttaaattcctaggatcatgagcaactaggtatgtcctactatgacttgagaaacaaaaagtgatcaaataacaa

SEQ ID NO: 15647 - DNA, 1221 bp, Glycine max
  Gm_smallRNAprecursor_8480
aagctcctgatgatataccatatcttgacaaatccatataaagatgaatattttttatggacaatgttagaatggttttctcctctagcttggtggcatatgaagctaaaacagattctagacactgatagaaaaagagaaatcacagaagatcacatgaaatatttggtttttattgtgattattcgccatccttatgttatggaacaaggataactttggtctagaaatgaagctcagatttaggaaacgtttgaagtttatcctttagatgtaagttataggatccagttggcaagacacctctgtgagattaataattattcatgcaaacctctgaacctagacctaccaagttcatcccaatggccaattgattgttatccttctgacagaataatacttcaaaatgatgatgacagttaaattcgcccagatatttatgtttcagatcctgcgttccaaaaggtggaagatctagtggatgacaatctcgctttagaacaagacttggaggactacaatgcccaattgatggaagagttattacacaaagatgataagacttccatacactagatgataataaggataataaggatattggataagacttccatacactagatgataataaggataataaggatattgcattttgtgtaataactcttccattaattgggcattgtagtcctccaagtattgttctaaagcgagattgtcatccactagatcttccaccttttggaacgcaggatttgaaacataaatatctgtgcgaatttgactgtcatcatcattttgaagtattattctgtcagtaggataacaatccattggcctttgggatgaacttggtaggtctaggttcagaggtttgcatgaataattattaatctcacagaggtgtcttttcaattggatcctataacttacatctaaaggataaacttcaaacatttcctaaatctgagcttcatttctagaccaaagttgtccttgttccataacataaggacgacgaataatcacaatagaaaccagatatttcatgtgatcttctgtgattcctctttgccttttagtgtctagaatctgttttaccttcatatgccaccaagctagaggagaaagccattctaacattgtccataaaaaatattcatctttatatggatttgtcaagatatggtatgccatcaggggctttaaggcgat

SEQ ID NO: 15648 - DNA, 1231 bp, Glycine max
  Gm_smallRNAprecursor_8481
ccatccttatgttatggaacaaggataactttggtctagaaatgaagctcagatttaggaaacgtttgaagtttatcctttagatgtaagttataggatccagttggcaagacacctctgtgagattaataattattcatgcaaacctctgaacctagacctaccaagttcatcccaatggccaattgattgttatccttctgacagaataatacttcaaaatgatgatgacagttaaattcgcccagatatttatgtttcagatcctgcgttccaaaaggtggaagatctagtggatgacaatctcgctttagaacaagacttggaggactacaatgcccaattgatggaagagttattacacaaagatgataagacttccatacactagatgataataaggataataaggatattggataagacttccatacactagatgataataaggataataaggatattgcattttgtgtaataactcttccattaattgggcattgtagtcctccaagtattgttctaaagcgagattgtcatccactagatcttccaccttttggaacgcaggatttgaaacataaatatctgtgcgaatttgactgtcatcatcattttgaagtattattctgtcagtaggataacaatccattggcctttgggatgaacttggtaggtctaggttcagaggtttgcatgaataattattaatctcacagaggtgtcttttcaattggatcctataacttacatctaaaggataaacttcaaacatttcctaaatctgagcttcatttctagaccaaagttgtccttgttccataacataaggacgacgaataatcacaatagaaaccagatatttcatgtgatcttctgtgattcctctttgccttttagtgtctagaatctgttttaccttcatatgccaccaagctagaggagaaagccattctaacattgtccataaaaaatattcatctttatatggatttgtcaagatatggtatgccatcaggggctttaaggcgatgggaatagaatattgaactgtattacaccaaatagcccatatggttggttcacacaaatctcatccaatctcacaaaaaagttcaaatatggctccaaagggtatctcagggtcaaatatttgtgcaagagtatatttgaatctcatggtttcgtgaacgaaatggaagtgacttggcatattgaagaatttctgttg

SEQ ID NO: 15649 - DNA, 1154 bp, Glycine max
  Gm_smallRNAprecursor_8482
ggtctagaaatgaagctcagatttaggaaacgtttgaagtttatcctttagatgtaagttataggatccagttggcaagacacctctgtgagattaataattattcatgcaaacctctgaacctagacctaccaagttcatcccaatggccaattgattgttatccttctgacagaataatacttcaaaatgatgatgacagttaaattcgcccagatatttatgtttcagatcctgcgttccaaaaggtggaagatctagtggatgacaatctcgctttagaacaagacttggaggactacaatgcccaattgatggaagagttattacacaaagatgataagacttccatacactagatgataataaggataataaggatattggataagacttccatacactagatgataataaggataataaggatattgcattttgtgtaataactcttccattaattgggcattgtagtcctccaagtattgttctaaagcgagattgtcatccactagatcttccaccttttggaacgcaggatttgaaacataaatatctgtgcgaatttgactgtcatcatcattttgaagtattattctgtcagtaggataacaatccattggcctttgggatgaacttggtaggtctaggttcagaggtttgcatgaataattattaatctcacagaggtgtcttttcaattggatcctataacttacatctaaaggataaacttcaaacatttcctaaatctgagcttcatttctagaccaaagttgtccttgttccataacataaggacgacgaataatcacaatagaaaccagatatttcatgtgatcttctgtgattcctctttgccttttagtgtctagaatctgttttaccttcatatgccaccaagctagaggagaaagccattctaacattgtccataaaaaatattcatctttatatggatttgtcaagatatggtatgccatcaggggctttaaggcgatgggaatagaatattgaactgtattacaccaaatagcccatatggttggttcacacaaatctcatccaatctcacaaaaaagttcaaatatggctccaaagggtatctcagggtcaaatatttgtgcaagagtatatttgaatctcatggtttc

SEQ ID NO: 15650 - DNA, 1155 bp, Glycine max
  Gm_smallRNAprecursor_8483
ggtctagaaatgaagctcagatttaggaaacgtttgaagtttatcctttagatgtaagttataggatccagttggcaagacacctctgtgagattaataattattcatgcaaacctctgaacctagacctaccaagttcatcccaatggccaattgattgttatccttctgacagaataatacttcaaaatgatgatgacagttaaattcgcccagatatttatgtttcagatcctgcgttccaaaaggtggaagatctagtggatgacaatctcgctttagaacaagacttggaggactacaatgcccaattgatggaagagttattacacaaagatgataagacttccatacactagatgataataaggataataaggatattggataagacttccatacactagatgataataaggataataaggatattgcattttgtgtaataactcttccattaattgggcattgtagtcctccaagtattgttctaaagcgagattgtcatccactagatcttccaccttttggaacgcaggatttgaaacataaatatctgtgcgaatttgactgtcatcatcattttgaagtattattctgtcagtaggataacaatccattggcctttgggatgaacttggtaggtctaggttcagaggtttgcatgaataattattaatctcacagaggtgtcttttcaattggatcctataacttacatctaaaggataaacttcaaacatttcctaaatctgagcttcatttctagaccaaagttgtccttgttccataacataaggacgacgaataatcacaatagaaaccagatatttcatgtgatcttctgtgattcctctttgccttttagtgtctagaatctgttttaccttcatatgccaccaagctagaggagaaagccattctaacattgtccataaaaaatattcatctttatatggatttgtcaagatatggtatgccatcaggggctttaaggcgatgggaatagaatattgaactgtattacaccaaatagcccatatggttggttcacacaaatctcatccaatctcacaaaaaagttcaaatatggctccaaagggtatctcagggtcaaatatttgtgcaagagtatatttgaatctcatggtttcg

SEQ ID NO: 15651 - DNA, 1175 bp, Glycine max
  Gm_smallRNAprecursor_8484
ttgattgttatccttctgacagaataatacttcaaaatgatgatgacagttaaattcgcccagatatttatgtttcagatcctgcgttccaaaaggtggaagatctagtggatgacaatctcgctttagaacaagacttggaggactacaatgcccaattgatggaagagttattacacaaagatgataagacttccatacactagatgataataaggataataaggatattggataagacttccatacactagatgataataaggataataaggatattgcattttgtgtaataactcttccattaattgggcattgtagtcctccaagtattgttctaaagcgagattgtcatccactagatcttccaccttttggaacgcaggatttgaaacataaatatctgtgcgaatttgactgtcatcatcattttgaagtattattctgtcagtaggataacaatccattggcctttgggatgaacttggtaggtctaggttcagaggtttgcatgaataattattaatctcacagaggtgtcttttcaattggatcctataacttacatctaaaggataaacttcaaacatttcctaaatctgagcttcatttctagaccaaagttgtccttgttccataacataaggacgacgaataatcacaatagaaaccagatatttcatgtgatcttctgtgattcctctttgccttttagtgtctagaatctgttttaccttcatatgccaccaagctagaggagaaagccattctaacattgtccataaaaaatattcatctttatatggatttgtcaagatatggtatgccatcaggggctttaaggcgatgggaatagaatattgaactgtattacaccaaatagcccatatggttggttcacacaaatctcatccaatctcacaaaaaagttcaaatatggctccaaagggtatctcagggtcaaatatttgtgcaagagtatatttgaatctcatggtttcgtgaacgaaatggaagtgacttggcatattgaagaatttctgttggattatggataaccaaccctggagggaaatccctaatggttttggttgtttcagctaagggttttaccatgaatatcaaagggaaggagtgagtagaagttatcaccttgatagtcttgctcggattgg

SEQ ID NO: 15652 - DNA, 1175 bp, Glycine max; identical to SEQ ID NO: 15651
  Gm_smallRNAprecursor_8485

SEQ ID NO: 15653 - DNA, 1174 bp, Glycine max
  Gm_smallRNAprecursor_8486
tgattgttatccttctgacagaataatacttcaaaatgatgatgacagttaaattcgcccagatatttatgtttcagatcctgcgttccaaaaggtggaagatctagtggatgacaatctcgctttagaacaagacttggaggactacaatgcccaattgatggaagagttattacacaaagatgataagacttccatacactagatgataataaggataataaggatattggataagacttccatacactagatgataataaggataataaggatattgcattttgtgtaataactcttccattaattgggcattgtagtcctccaagtattgttctaaagcgagattgtcatccactagatcttccaccttttggaacgcaggatttgaaacataaatatctgtgcgaatttgactgtcatcatcattttgaagtattattctgtcagtaggataacaatccattggcctttgggatgaacttggtaggtctaggttcagaggtttgcatgaataattattaatctcacagaggtgtcttttcaattggatcctataacttacatctaaaggataaacttcaaacatttcctaaatctgagcttcatttctagaccaaagttgtccttgttccataacataaggacgacgaataatcacaatagaaaccagatatttcatgtgatcttctgtgattcctctttgccttttagtgtctagaatctgttttaccttcatatgccaccaagctagaggagaaagccattctaacattgtccataaaaaatattcatctttatatggatttgtcaagatatggtatgccatcaggggctttaaggcgatgggaatagaatattgaactgtattacaccaaatagcccatatggttggttcacacaaatctcatccaatctcacaaaaaagttcaaatatggctccaaagggtatctcagggtcaaatatttgtgcaagagtatatttgaatctcatggtttcgtgaacgaaatggaagtgacttggcatattgaagaatttctgttggattatggataaccaaccctggagggaaatccctaatggttttggttgtttcagctaagggttttaccatgaatatcaaagggaaggagtgagtagaagttatcaccttgatagtcttgctcggattgg

SEQ ID NO: 15654 - DNA, 1174 bp, Glycine max; identical to SEQ ID NO: 15653
  Gm_smallRNAprecursor_8487

SEQ ID NO: 15655 - DNA, 1218 bp, Glycine max
  Gm_smallRNAprecursor_8488
gtcgctagtgcatcttctttgtgtatgtgtaacttgtaaatattcaatgaatgtattatgttataaaatttgattcaaagaaaattttaacgaataaataaaatagattctcaccagccaacatgagtggtttctttaaatgtttgtagtttgagttattgcgaacaaagttttgtgtaatgtggcgcaggcaaaagaaatgggatgtgtcctggacccataagttacttgggttgttgtaggcatttataattgaggggtgtcggtctgaaatgagagaaatgttaatttgcggagtaacatgtcttctcaaattctttagaaaaaacccccaagctgaagttgtctccctttctacaatggcgtaggcaatcgggaagatatggttagctccatcttgtgcggtagctatcaacagtgtgacagtatacttctcgtaaagccatgtaccatctacttgtactatgggtttgcaatatggaaaaccattaatgcatggaccaaatgaccaaaagatacgtttaaacaatcttttgcccggtactatttctccccctcatacaaggattctgtttgagcagcgaccacagtcccgggaacacaagattgcaaagctccgaaaagttttggcactttggcacatgattcttcccaatttccatgaatcatctccaatgctctttgctttgctaaccatgtcttcttgtaggatagggtataattcatgaacgttttgatctctgcaatcaacgtcttgatggagacggttgggtttgttttgacaattggttggatgatctgtgctataatgtgtttgacgagttggcgatgatcttatctgagcatcggcatgagacaagtgtgatgacctctgatactcttgataatccatttgttatgcctctttgaattgcatgcgcccaagctccatgtacaaccactttcatgtaacttgcagacgaagtttagccttctctggtcagagtaaattattttgcaatcaaaatgatttctgatgttgtattctttgattgctcgaatacattgtgctttgtcatcgaaggtcatgccaacctcgagtataccgattggtggttgtacattgtgttgctgatgaacaaaatggtgttgatcaatgtagtgtggtaagtggtcaaagttcaagtctactggacacctaggttgctgatattgcaacggaggtgacggaggtgtcgt

SEQ ID NO: 15656 - DNA, 1074 bp, Glycine max
  Gm_smallRNAprecursor_8489
gtgtatgtgtaacttgtaaatattcaatgaatgtattatgttataaaatttgattcaaagaaaattttaacgaataaataaaatagattctcaccagccaacatgagtggtttctttaaatgtttgtagtttgagttattgcgaacaaagttttgtgtaatgtggcgcaggcaaaagaaatgggatgtgtcctggacccataagttacttgggttgttgtaggcatttataattgaggggtgtcggtctgaaatgagagaaatgttaatttgcggagtaacatgtcttctcaaattctttagaaaaaacccccaagctgaagttgtctccctttctacaatggcgtaggcaatcgggaagatatggttagctccatcttgtgcggtagctatcaacagtgtgacagtatacttctcgtaaagccatgtaccatctacttgtactatgggtttgcaatatggaaaaccattaatgcatggaccaaatgaccaaaagatacgtttaaacaatcttttgcccggtactatttctccccctcatacaaggattctgtttgagcagcgaccacagtcccgggaacacaagattgcaaagctccgaaaagttttggcactttggcacatgattcttcccaatttccatgaatcatctccaatgctctttgctttgctaaccatgtcttcttgtaggatagggtataattcatgaacgttttgatctctgcaatcaacgtcttgatggagacggttgggtttgttttgacaattggttggatgatctgtgctataatgtgtttgacgagttggcgatgatcttatctgagcatcggcatgagacaagtgtgatgacctctgatactcttgataatccatttgttatgcctctttgaattgcatgcgcccaagctccatgtacaaccactttcatgtaacttgcagacgaagtttagccttctctggtcagagtaaattattttgcaatcaaaatgatttctgatgttgtattctttgattgctcgaatacattgtgctttgtcatcgaaggtcatgccaacctcgagtataccgattggtg

SEQ ID NO: 15657 - DNA, 1076 bp, Glycine max
  Gm_smallRNAprecursor_8490
gtgtatgtgtaacttgtaaatattcaatgaatgtattatgttataaaatttgattcaaagaaaattttaacgaataaataaaatagattctcaccagccaacatgagtggtttctttaaatgtttgtagtttgagttattgcgaacaaagttttgtgtaatgtggcgcaggcaaaagaaatgggatgtgtcctggacccataagttacttgggttgttgtaggcatttataattgaggggtgtcggtctgaaatgagagaaatgttaatttgcggagtaacatgtcttctcaaattctttagaaaaaacccccaagctgaagttgtctccctttctacaatggcgtaggcaatcgggaagatatggttagctccatcttgtgcggtagctatcaacagtgtgacagtatacttctcgtaaagccatgtaccatctacttgtactatgggtttgcaatatggaaaaccattaatgcatggaccaaatgaccaaaagatacgtttaaacaatcttttgcccggtactatttctccccctcatacaaggattctgtttgagcagcgaccacagtcccgggaacacaagattgcaaagctccgaaaagttttggcactttggcacatgattcttcccaatttccatgaatcatctccaatgctctttgctttgctaaccatgtcttcttgtaggatagggtataattcatgaacgttttgatctctgcaatcaacgtcttgatggagacggttgggtttgttttgacaattggttggatgatctgtgctataatgtgtttgacgagttggcgatgatcttatctgagcatcggcatgagacaagtgtgatgacctctgatactcttgataatccatttgttatgcctctttgaattgcatgcgcccaagctccatgtacaaccactttcatgtaacttgcagacgaagtttagccttctctggtcagagtaaattattttgcaatcaaaatgatttctgatgttgtattctttgattgctcgaatacattgtgctttgtcatcgaaggtcatgccaacctcgagtataccgattggtggt

SEQ ID NO: 15658 - DNA, 1077 bp, Glycine max
  Gm_smallRNAprecursor_8491
gtgtatgtgtaacttgtaaatattcaatgaatgtattatgttataaaatttgattcaaagaaaattttaacgaataaataaaatagattctcaccagccaacatgagtggtttctttaaatgtttgtagtttgagttattgcgaacaaagttttgtgtaatgtggcgcaggcaaaagaaatgggatgtgtcctggacccataagttacttgggttgttgtaggcatttataattgaggggtgtcggtctgaaatgagagaaatgttaatttgcggagtaacatgtcttctcaaattctttagaaaaaacccccaagctgaagttgtctccctttctacaatggcgtaggcaatcgggaagatatggttagctccatcttgtgcggtagctatcaacagtgtgacagtatacttctcgtaaagccatgtaccatctacttgtactatgggtttgcaatatggaaaaccattaatgcatggaccaaatgaccaaaagatacgtttaaacaatcttttgcccggtactatttctccccctcatacaaggattctgtttgagcagcgaccacagtcccgggaacacaagattgcaaagctccgaaaagttttggcactttggcacatgattcttcccaatttccatgaatcatctccaatgctctttgctttgctaaccatgtcttcttgtaggatagggtataattcatgaacgttttgatctctgcaatcaacgtcttgatggagacggttgggtttgttttgacaattggttggatgatctgtgctataatgtgtttgacgagttggcgatgatcttatctgagcatcggcatgagacaagtgtgatgacctctgatactcttgataatccatttgttatgcctctttgaattgcatgcgcccaagctccatgtacaaccactttcatgtaacttgcagacgaagtttagccttctctggtcagagtaaattattttgcaatcaaaatgatttctgatgttgtattctttgattgctcgaatacattgtgctttgtcatcgaaggtcatgccaacctcgagtataccgattggtggtt

SEQ ID NO: 15659 - DNA, 1062 bp, Glycine max
  Gm_smallRNAprecursor_8492
tgtaacttgtaaatattcaatgaatgtattatgttataaaatttgattcaaagaaaattttaacgaataaataaaatagattctcaccagccaacatgagtggtttctttaaatgtttgtagtttgagttattgcgaacaaagttttgtgtaatgtggcgcaggcaaaagaaatgggatgtgtcctggacccataagttacttgggttgttgtaggcatttataattgaggggtgtcggtctgaaatgagagaaatgttaatttgcggagtaacatgtcttctcaaattctttagaaaaaacccccaagctgaagttgtctccctttctacaatggcgtaggcaatcgggaagatatggttagctccatcttgtgcggtagctatcaacagtgtgacagtatacttctcgtaaagccatgtaccatctacttgtactatgggtttgcaatatggaaaaccattaatgcatggaccaaatgaccaaaagatacgtttaaacaatcttttgcccggtactatttctccccctcatacaaggattctgtttgagcagcgaccacagtcccgggaacacaagattgcaaagctccgaaaagttttggcactttggcacatgattcttcccaatttccatgaatcatctccaatgctctttgctttgctaaccatgtcttcttgtaggatagggtataattcatgaacgttttgatctctgcaatcaacgtcttgatggagacggttgggtttgttttgacaattggttggatgatctgtgctataatgtgtttgacgagttggcgatgatcttatctgagcatcggcatgagacaagtgtgatgacctctgatactcttgataatccatttgttatgcctctttgaattgcatgcgcccaagctccatgtacaaccactttcatgtaacttgcagacgaagtttagccttctctggtcagagtaaattattttgcaatcaaaatgatttctgatgttgtattctttgattgctcgaatacattgtgctttgtcatcgaaggtcatgccaacctcgagtataccgat

SEQ ID NO: 15660 - DNA, 1064 bp, Glycine max
  Gm_smallRNAprecursor_8493
tgtaacttgtaaatattcaatgaatgtattatgttataaaatttgattcaaagaaaattttaacgaataaataaaatagattctcaccagccaacatgagtggtttctttaaatgtttgtagtttgagttattgcgaacaaagttttgtgtaatgtggcgcaggcaaaagaaatgggatgtgtcctggacccataagttacttgggttgttgtaggcatttataattgaggggtgtcggtctgaaatgagagaaatgttaatttgcggagtaacatgtcttctcaaattctttagaaaaaacccccaagctgaagttgtctccctttctacaatggcgtaggcaatcgggaagatatggttagctccatcttgtgcggtagctatcaacagtgtgacagtatacttctcgtaaagccatgtaccatctacttgtactatgggtttgcaatatggaaaaccattaatgcatggaccaaatgaccaaaagatacgtttaaacaatcttttgcccggtactatttctccccctcatacaaggattctgtttgagcagcgaccacagtcccgggaacacaagattgcaaagctccgaaaagttttggcactttggcacatgattcttcccaatttccatgaatcatctccaatgctctttgctttgctaaccatgtcttcttgtaggatagggtataattcatgaacgttttgatctctgcaatcaacgtcttgatggagacggttgggtttgttttgacaattggttggatgatctgtgctataatgtgtttgacgagttggcgatgatcttatctgagcatcggcatgagacaagtgtgatgacctctgatactcttgataatccatttgttatgcctctttgaattgcatgcgcccaagctccatgtacaaccactttcatgtaacttgcagacgaagtttagccttctctggtcagagtaaattattttgcaatcaaaatgatttctgatgttgtattctttgattgctcgaatacattgtgctttgtcatcgaaggtcatgccaacctcgagtataccgattg

SEQ ID NO: 15661 - DNA, 1188 bp, Glycine max
  Gm_smallRNAprecursor_8494
gtcgtgcttgcattttgtgggtcaacaaacatctttgtctttcgcctataccagaccatgtagtccgagttaaagctcaataggccctcttgtcggggataagcgtcgaccataaaagcatggcgattgttccactgatcaatcattggggcgaacaattgcccccaatttttgtcatgtttcccttttagtgttatgccatgaatgttcaagggttgcgaaggagactctggaattggttgctgcattccaaattgtctcaatacgctatccggttggtgccactcaataacttggaaacaaattagtggcaccaccgcgcaccacgcgacacttctgactacacaaataggaggcaacaatgatataacagttgttgtgtaaggctcccacacaaactgcatatgacaacatagttgttagcattttagtaaaataacacatatcgttttttattttacaaatacaataccatgttcttacctcatgacgtttcataatatccaacttgcgacgaaaaactctcacatcatcattgccgatatattggtttccacgtcgcagccaactacaaagattaaaatttaatataccctaaaaccatttattcttttgaaatgaaagacgcttttaaaaatgactaacctgtgccctagtgatttattttctacttgggaaggagtcctctttggagccaaggttggacatcgttcccatgcccacatttgtagtaagatacacatacctccgattgatttagttttataatcggtggcactacacatctctctgtatagaaaagcaagtacggtaggtccccatgcatatgtgctacagtcttcaaagtcacgtaaaaattgaaggtacattagcgaaactttgttactgcttttgtcaacgaacaagacacctccaatgaatcttagtatccatgcacgggcaaaccttcgtacttgttcttcatcatcgtggttatttatttgtgcaaaatggtgagccaaccaacttaatttaaccacactacctttaatttcaccttcttgtggtctgactcccaataattcctcacataaatcagcccaattaagatttgttggaccgattaatggtaaaccatccacacgtagacctaacaatacagagacgtcttggagagtaatagtacactctccgcatctcatgtgaaag

SEQ ID NO: 15662 - DNA, 1035 bp, Glycine max
  Gm_smallRNAprecursor_8495
acaaataatgtataaattattttgtgaatttattgcagtatcaatgacatcttcatcgtcatgtccatcacatattaaaattaagtctggcccgatcgatagtgatgtattatggatgcaacctaagcatgtttcagaacatgtttggaatggggaagaagatcggaaattacatatcagacaagttgtccccatgtatcaaggggaagaagaaatttcagagcaaatttttccttttcttcgaaaatctggtttttactgaattatgaagatgggatacttaaaaataaatgtctcattaataagtgctttgatagaaagatggaggccaaaaacacatacgtttcacatgagatgcggagagtgtactattactctccaagacgtctatgtattgttaggtttacgtgtggatggtctaccattaatcggtccaacaaatcttaattgggctgatttatgtgagaaattattgggagtcagaccacaagaaggtgaaattaaaggtagtgtggttaaattgagttgactggctcaccattttgcacaaataaataaccacgatgacgaagaacaagtacgaaggtttgcccgtgcatggatactacgattcattggaggtgtcttgttcgttgacaaaagcagtaacaaagtttcgctaagataccttcaatttttacgtgactttcaagactgtagcacatatgcatggggacctgccatacttgcttttctatacagagagatgtgtagtgccaccgattataaaactaaatcaattgaaggtatgtacatcttactacaaatgtggacatgagaacgatgtccaaccttggctccaaagaggactccttcccaagtagaaaataaaccactggggcacagattagtcatttttaaaagcgtcattcatttcaaaagaataaatggttttagggtatattaaatttgaatctttgtaagtggctgcgacgtggaaaccaacatatcaacaatgatgatgtcagagcttttcgttgcaagttggatattatg

SEQ ID NO: 15663 - DNA, 1053 bp, Glycine max
  Gm_smallRNAprecursor_8496
ggtcatcatcatcagccgttcaaatggaaaaacctttattcaaaccttttaaggttaccgaaaaatccaaacagaaattcaggaaacttagaaaacaaaaatcccctactgaggagataagtgatagcaatagtgaattattaagcaagattaatagtttacttaaaactgtccctaaaacccttcaaccttcagaacaatcatccaaaataaggactagacacacctccaaactaattaatgtcattaacgaggatagtgacaataattcagaacaagtatctaaagaaggttcaatgtctaaaaaagtaatcaatccgattaacaccaaacattggaaaataccttccaaactttattaccaaaggccaaccacccctgatcttctactagaagaaagaggcgaaaataactttaaaagttttagtgcaaaccatggttatcaaactctcgagttaactcgctaactcttacgagtttacgagtccacttgtcctttgcgagttgactcttgagtaaactctttttttagtagactctgggtaaaatctataaactctaagtaaactcggtagactctcgagtttaccaccgagtcaacgagttagcaagttaaaaaaattagaccaaaatgtaagtaatattttattgttttctgtctatttagtattcaacataccttcatttaacatgtttttctcaaatacaaaattatcacctttaataatatcaaaccattgttctctaataacatcaaaccctcaatgagaatgatctaccactactataacctctacaagttattgtctagtggtgatgtattattactaaacttgcttatttaaatatttttgaattttatgatttactgttttactttattatattgttgaaatgtttaattagtatgttatttatagatattttgttattatttttatatgaagtagactcttacgagttgagtctatgagtcgagtctatgagtcaagtctatggaactctcatgagtctgcgtaaactttcgagtttgataaccttggtgcaaacaac

SEQ ID NO: 15664 - DNA, 1185 bp, Glycine max
  Gm_smallRNAprecursor_8497
ctacattgatcgacaccattttgttcatcagcaacacaatgtacaaccaccagtcggtgtactcgaggttggcatgaccttcgatgacaaagcacaatgtattcgagcaatcaaagaatacaacatcagaaatcattttgattgcagaacaatttactctgaacaaagaaggctaaacttcatctgcaagttacatgaaaatggttgtacatggagcttgggcgcatgcaattcaaagaggcataacaaatggattatcaagagtatcagaggtcatcacacttgtctcgtgccgatgctcagacaagatcatcgccaacttgacaaacacgtcatagcacagattatccaaccaattgtcaaaacaaacccaactgtctccatcaagacgttgattgtagagatcaaaacgttcatgaattataccccatcctacaagaagacatggttagcaaagcaaaaagcattggagatgattcatggaaactgggaagaatcatatgccaaactgccaaaacttttcggagctttgcaatcttgtgttcccgggactgtggtcgctgctcaaacagaatccttgtatgaggggggagaaatagtactaggcaaaagattgtttaaacatgtcttttggtcatttggtccatgcattaatggttttgcatattgcaaacccattgtacaagtagatggtacatggctttacggaaagtatactggcacactgttgatagctaccgcacaagatggagctaaccatatcttcccgattgcctatgccattgtagaaggggagacaacttcagcttgaggggtttttctaaagaatttgagaagacatgttactccacaaattaacatttctcttatttctgaccgacacccctcaattataagtgcctacaacaacccaagtaacttatgagtccaggacacatcccatttcttttgcctgcgccacattgcacaaaactttcttcgtggtaactcaaactgcaaacatttaaagaaaccacttatgttggctggtgagaatctattttatttattcgttataattttctttcaatcaaattttataacataatacattgattaaatatttacagggtacgcatacacggagaagatgcactggcgacatcttggggatattcgtgcgaataagccaagtgcagctgaatg

SEQ ID NO: 15665 - DNA, 1190 bp, Glycine max
  Gm_smallRNAprecursor_8498
ctatattgatcgacaccattttgttcatcagcaacacaatgtacaaccaccagtcggtgtactcgaggttggcatgaccttcgatgacaaagcacaatgtatttgagcaatcaaggaatacaacatcagaaatcattttgattgcaaaacaatttactctgaccaaagaaggctaaacttcatctgcaagttacatgaaaatggttgtacatggagcttgggcgcatgcaattcaaagaggcataacaaatggattatcaagagtatcagaggtcatcacacttgtctcgtgccgatgctcagacaagatcatcgccaactcaacaaacacgtcatagcacagatcatccaaccaattgtcaaaacaaacccaactgtctccatcaagacgttgattgcagagatcaaagcgttcatgaattataccccatcctacaagaagacagggttagcaaagcaaaaagcattggagatgattcatggaaactgggaagaatcatatgccaaactgccaaaacttttcggagctttgcaatcttgtgttctcgggactgtggtcgctgctcaaacagaatccttgtatgagggggggggggggaaatagtaccgggcaaaatattgtttaaacgtgtcttttggtcatttggtccatgcattaatggttctgtatattgcaaacccattgtacaagtagatggtacatggctttacggaaagtatattggcacactgttgatagctaccgcacaagatggagctaaccatatcttcccgattgcctatgccattgtagaaggggagacaacttcagcttgggggttttttctaaagaatttgagaagacatgttactccgcaaattaacatttctcttatttcagaccaacacccctcaattataagtgcctacagcaacccaagtaacttatgggtccaagacacatcccatttcttttgcatgcgccacattgcacaaaactttcttcgtggtaactcaaactgcaaacatttaaagaaaccacttatgttggctggtgagaatctattttatttattcgttataattttctttcaatcaaattttataacataatacattgattaaatatttacagggtacgcatacacggagaagatgcactggcaacatcttggggatattcgtgcgaataagccaagtgcagctgaatg

SEQ ID NO: 15666 - DNA, 1159 bp, Glycine max
  Gm_smallRNAprecursor_8499
tccaactttgcattgtcctggattttttcatgacaatataggtatgggaaaacagaaagcagtaaacaattcccaccattgcagagacatgcttttgtcaaatgggggacccaatttgatacttcaaaggcggcaccagaccaagtcaagaactgatttcaagcacacccagaattcttaaagcctgctaatccggagacttcattgtttctaaatcaaaagtcacaactagcagctttcttagccagctcaaagtctaaggaaagtttagctaagaatttaaaagaagttctccaacttcttcaacaagaggaagaagaaggttcttcatccaaaaaggaagaaaatgaatagtgtctctaaggcacattaaaattgttgatctatgcccatatcaattaagggtttgatggctacttgtacacaacctatgtgtaaatatttatatttacggctatgttcataaatttagttttttgaaagtaaatgaaattcttcccctatatcttgtcctagaggaatattattttctacagttttgattatgtaatcaaaattatgtttgtctttaattgttttaggaacatatatggtgtcctaaggaatttatggaatgttccagtcattcatgttttgatttatatcttcgaattggacttcctcatcgaagagattgtgttttggggtgacctcatgggtctggttttcgtgctcattgagcaaattattattatttttgggagaattcattgaggatgaagataaggatgagttagatctaaacgaaatgcgggagaaagagcacaaaagacgagacatattgaattcatcctctagtatctttgtcgtcatatggttccataaaaatgtttctataagcatatatattactaaatttcttggatctgaaaaatggaaaaaattctctttcttttataaaaaaacaaacaatatagtttgaacgttacttctatagccaccagtatattatgtctcaatatttatttgaacaatacaccttagtcttactgccctttctcaaccacgggtcttactgctacagtatcatccaactaaaatatcagactagccaataacaacaaaacaaactgtggcagactacgcctggtcaattcaaactcttcaggccctcgaagac

SEQ ID NO: 15667 - DNA, 1157 bp, Glycine max
  Gm_smallRNAprecursor_8500
cttccgatattgtttatatcgaattatcataccattttacataatttttttccgtaatcgtttcatatatatatatatatatgtttgaacagtatttttctagaagcacaacaatctgatattttaattaaatgatattgtagcagtaagtcccgtgattgagaaaggacaataagactaaggtgtattgttcaaataaaatattgagacataatatactggtggttataggagtagtgttcaaactatattgtctgtaaaaaaaaaatctttttcatttgttcagatccaagaagttctgtaacatatagccttatggaaatatttctatggaaccaaatgaagacaaagatattagataatgttataatcatgtctagactattacgatctttttcctgtatctcttttcgatcaaattcctcctcatcatcttcttcaagaaactccaatttattaaatgatcaagataaccagacccaagaggtcgccccaaaacacaatctcttcgatgaggaagtccgattcgaagatatcaatcaaaacatggatgactggaacattccagaaatccctcaggatcaactatacgttcctgaaacaattaaggacaaacacaactttgattacataatcaaaacagtagaaaacaatattcctctaggacaagatataggggaagaatttcatttactttcaaaaaattcaatttatgaacatagtcgtaagtataaatatctacacatcggttgtgtacaagtagccatcaagcccttaattgatatgggcatagatgcagcagttttaatgtgtctaagagatattaggcataatcaatttgaagactccctaattggaacagtcgaaaccagcctaggacaaggtccaatatattttaattgttatccaaacaaaacagtgagtctgatagacagaaacattcttgactctctgttcttaaacatccactttcatggccttgacatgaaagaaggatcaatcccagcagccttaatttataggatccagtacaaggtcatgaatacttgtgcatctagagtcctattaaaacctcaaaaaggagaaacaactttgtttatcactgatatgacaaaggctaatatttctctcccgagaaaaataaaatgggatgaagt

SEQ ID NO: 15668 - DNA, 1208 bp, Glycine max
  Gm_smallRNAprecursor_8501
ctaaggcatcgggaatctccctaaggagaggaaggagtacaggcaaaggagccagactggctcttccagagccaaccatcaagaaatcatcaacctcttctgggtcaccaacccaggctgggtcatctacccaaaaaaccaatttagaagggtcatcaacccagatttcctcaatcaaacctgagccatccactcaggaatctcccaaaccggcaaccgccaaacaaacatcggccgactatgcatggccaactgaaacccttcaggcccttcaagacatgggtctaaccaaatttccaaaaataatcaaaaaatcttgggcagacattgcctcagaatctgatgatgaatctgaatcaaatttacaaacaatgatccaaaatgcgtcaatgatcaaaacagtcaccaatactaaaggaaaactacctttagccaaagctcaaacaccacctaccaaacaaactaacaattatatttataaaaataaatttacaactgttttgcagatggaacctgaattttgggacaaaaatcccttcaaggcaacggccaaggctttcccaccaggatttcactacaaaccaaccaccgtcctaaagacaagaaccttttatgaattgattttggtagattcaaactcagtatctatcaaacatttcaaagacccaaaagaccaaacattaaacacccactcgacaatccaaatactaaaagttcttcaaccaagacactttggttcggacttgaacaaaggaaaaagattctcagttccatttgatccggtaggttatacctattgggattatgttgatgcttggactaaggtgttttggcaccaaaatacccgcttcaagcattcatggctgatatatttcaagaccaatacaatttacaattttcccaattggtttttacaatggtgggatttctttggaccaatcccagagatattcccagaaacagtccaacaaggatttgctcaatttgagagacaatacaattcacaggaatcacgaattccagcaaatcttaaatacttttcaagctttgcattgtcatggatattctcatggcaatatcgttacagcaagactgaaaagacaaatcaatatccatcactacaaagacacgcatttgtaaaatggtggacacaatttgactcatccaaagcggatccagaacaagtaaaactctggttccaatcccat

SEQ ID NO: 15669 - DNA, 1208 bp, Glycine max; identical to SEQ ID NO: 15668
  Gm_smallRNAprecursor_8502

SEQ ID NO: 15670 - DNA, 1211 bp, Glycine max
  Gm_smallRNAprecursor_8503
ctaaggcatcgggaatctccctaaggagaggaaggagtacaggcaaaggagccagactggctcttccagagccaaccatcaagaaatcatcaacctcttctgggtcaccaacccaggctgggtcatctacccaaaaaaccaatttagaagggtcatcaacccagatttcctcaatcaaacctgagccatccactcaggaatctcccaaaccggcaaccgccaaacaaacatcggccgactatgcatggccaactgaaacccttcaggcccttcaagacatgggtctaaccaaatttccaaaaataatcaaaaaatcttgggcagacattgcctcagaatctgatgatgaatctgaatcaaatttacaaacaatgatccaaaatgcgtcaatgatcaaaacagtcaccaatactaaaggaaaactacctttagccaaagctcaaacaccacctaccaaacaaactaacaattatatttataaaaataaatttacaactgttttgcagatggaacctgaattttgggacaaaaatcccttcaaggcaacggccaaggctttcccaccaggatttcactacaaaccaaccaccgtcctaaagacaagaaccttttatgaattgattttggtagattcaaactcagtatctatcaaacatttcaaagacccaaaagaccaaacattaaacacccactcgacaatccaaatactaaaagttcttcaaccaagacactttggttcggacttgaacaaaggaaaaagattctcagttccatttgatccggtaggttatacctattgggattatgttgatgcttggactaaggtgttttggcaccaaaatacccgcttcaagcattcatggctgatatatttcaagaccaatacaatttacaattttcccaattggtttttacaatggtgggatttctttggaccaatcccagagatattcccagaaacagtccaacaaggatttgctcaatttgagagacaatacaattcacaggaatcacgaattccagcaaatcttaaatacttttcaagctttgcattgtcatggatattctcatggcaatatcgttacagcaagactgaaaagacaaatcaatatccatcactacaaagacacgcatttgtaaaatggtggacacaatttgactcatccaaagcggatccagaacaagtaaaactctggttccaatcccatcca

SEQ ID NO: 15671 - DNA, 1098 bp, Glycine max
  Gm_smallRNAprecursor_8504
ggaatctccctaaggagaggaaggagtacaggcaaaggagccagactggctcttccagagccaaccatcaagaaatcatcaacctcttctgggtcaccaacccaggctgggtcatctacccaaaaaaccaatttagaagggtcatcaacccagatttcctcaatcaaacctgagccatccactcaggaatctcccaaaccggcaaccgccaaacaaacatcggccgactatgcatggccaactgaaacccttcaggcccttcaagacatgggtctaaccaaatttccaaaaataatcaaaaaatcttgggcagacattgcctcagaatctgatgatgaatctgaatcaaatttacaaacaatgatccaaaatgcgtcaatgatcaaaacagtcaccaatactaaaggaaaactacctttagccaaagctcaaacaccacctaccaaacaaactaacaattatatttataaaaataaatttacaactgttttgcagatggaacctgaattttgggacaaaaatcccttcaaggcaacggccaaggctttcccaccaggatttcactacaaaccaaccaccgtcctaaagacaagaaccttttatgaattgattttggtagattcaaactcagtatctatcaaacatttcaaagacccaaaagaccaaacattaaacacccactcgacaatccaaatactaaaagttcttcaaccaagacactttggttcggacttgaacaaaggaaaaagattctcagttccatttgatccggtaggttatacctattgggattatgttgatgcttggactaaggtgttttggcaccaaaatacccgcttcaagcattcatggctgatatatttcaagaccaatacaatttacaattttcccaattggtttttacaatggtgggatttctttggaccaatcccagagatattcccagaaacagtccaacaaggatttgctcaatttgagagacaatacaattcacaggaatcacgaattccagcaaatcttaaatacttttcaagctttgcattgtcatggatattctcatggcaatatcgttacagcaagactgaaaagacaaatcaa

SEQ ID NO: 15672 - DNA, 1171 bp, Glycine max
  Gm_smallRNAprecursor_8505
tcccaaaccggcaaccgccaaacaaacatcggccgactatgcatggccaactgaaacccttcaggcccttcaagacatgggtctaaccaaatttccaaaaataatcaaaaaatcttgggcagacattgcctcagaatctgatgatgaatctgaatcaaatttacaaacaatgatccaaaatgcgtcaatgatcaaaacagtcaccaatactaaaggaaaactacctttagccaaagctcaaacaccacctaccaaacaaactaacaattatatttataaaaataaatttacaactgttttgcagatggaacctgaattttgggacaaaaatcccttcaaggcaacggccaaggctttcccaccaggatttcactacaaaccaaccaccgtcctaaagacaagaaccttttatgaattgattttggtagattcaaactcagtatctatcaaacatttcaaagacccaaaagaccaaacattaaacacccactcgacaatccaaatactaaaagttcttcaaccaagacactttggttcggacttgaacaaaggaaaaagattctcagttccatttgatccggtaggttatacctattgggattatgttgatgcttggactaaggtgttttggcaccaaaatacccgcttcaagcattcatggctgatatatttcaagaccaatacaatttacaattttcccaattggtttttacaatggtgggatttctttggaccaatcccagagatattcccagaaacagtccaacaaggatttgctcaatttgagagacaatacaattcacaggaatcacgaattccagcaaatcttaaatacttttcaagctttgcattgtcatggatattctcatggcaatatcgttacagcaagactgaaaagacaaatcaatatccatcactacaaagacacgcatttgtaaaatggtggacacaatttgactcatccaaagcggatccagaacaagtaaaactctggttccaatcccatccagaattcctcaaagcagctgatccagaaacttctgtgtttttaaaccaaaagtctcatctggcagcatttttagcgggatcgacatcaaatgaggtcttagctaaaaatctgaaggaagttctgcaaatgttacagcaggaagaagaaggttcatcctcaaag

SEQ ID NO: 15673 - DNA, 1166 bp, Glycine max
  Gm_smallRNAprecursor_8506
ccaaaccggcaaccgccaaacaaacatcggccgactatgcatggccaactgaaacccttcaggcccttcaagacatgggtctaaccaaatttccaaaaataatcaaaaaatcttgggcagacattgcctcagaatctgatgatgaatctgaatcaaatttacaaacaatgatccaaaatgcgtcaatgatcaaaacagtcaccaatactaaaggaaaactacctttagccaaagctcaaacaccacctaccaaacaaactaacaattatatttataaaaataaatttacaactgttttgcagatggaacctgaattttgggacaaaaatcccttcaaggcaacggccaaggctttcccaccaggatttcactacaaaccaaccaccgtcctaaagacaagaaccttttatgaattgattttggtagattcaaactcagtatctatcaaacatttcaaagacccaaaagaccaaacattaaacacccactcgacaatccaaatactaaaagttcttcaaccaagacactttggttcggacttgaacaaaggaaaaagattctcagttccatttgatccggtaggttatacctattgggattatgttgatgcttggactaaggtgttttggcaccaaaatacccgcttcaagcattcatggctgatatatttcaagaccaatacaatttacaattttcccaattggtttttacaatggtgggatttctttggaccaatcccagagatattcccagaaacagtccaacaaggatttgctcaatttgagagacaatacaattcacaggaatcacgaattccagcaaatcttaaatacttttcaagctttgcattgtcatggatattctcatggcaatatcgttacagcaagactgaaaagacaaatcaatatccatcactacaaagacacgcatttgtaaaatggtggacacaatttgactcatccaaagcggatccagaacaagtaaaactctggttccaatcccatccagaattcctcaaagcagctgatccagaaacttctgtgtttttaaaccaaaagtctcatctggcagcatttttagcgggatcgacatcaaatgaggtcttagctaaaaatctgaaggaagttctgcaaatgttacagcaggaagaagaaggttcatcctca

SEQ ID NO: 15674 - DNA, 1169 bp, Glycine max
  Gm_smallRNAprecursor_8507
ccaaaccggcaaccgccaaacaaacatcggccgactatgcatggccaactgaaacccttcaggcccttcaagacatgggtctaaccaaatttccaaaaataatcaaaaaatcttgggcagacattgcctcagaatctgatgatgaatctgaatcaaatttacaaacaatgatccaaaatgcgtcaatgatcaaaacagtcaccaatactaaaggaaaactacctttagccaaagctcaaacaccacctaccaaacaaactaacaattatatttataaaaataaatttacaactgttttgcagatggaacctgaattttgggacaaaaatcccttcaaggcaacggccaaggctttcccaccaggatttcactacaaaccaaccaccgtcctaaagacaagaaccttttatgaattgattttggtagattcaaactcagtatctatcaaacatttcaaagacccaaaagaccaaacattaaacacccactcgacaatccaaatactaaaagttcttcaaccaagacactttggttcggacttgaacaaaggaaaaagattctcagttccatttgatccggtaggttatacctattgggattatgttgatgcttggactaaggtgttttggcaccaaaatacccgcttcaagcattcatggctgatatatttcaagaccaatacaatttacaattttcccaattggtttttacaatggtgggatttctttggaccaatcccagagatattcccagaaacagtccaacaaggatttgctcaatttgagagacaatacaattcacaggaatcacgaattccagcaaatcttaaatacttttcaagctttgcattgtcatggatattctcatggcaatatcgttacagcaagactgaaaagacaaatcaatatccatcactacaaagacacgcatttgtaaaatggtggacacaatttgactcatccaaagcggatccagaacaagtaaaactctggttccaatcccatccagaattcctcaaagcagctgatccagaaacttctgtgtttttaaaccaaaagtctcatctggcagcatttttagcgggatcgacatcaaatgaggtcttagctaaaaatctgaaggaagttctgcaaatgttacagcaggaagaagaaggttcatcctcaaag

SEQ ID NO: 15675 - DNA, 1107 bp, Glycine max
  Gm_smallRNAprecursor_8508
aaccggcaaccgccaaacaaacatcggccgactatgcatggccaactgaaacccttcaggcccttcaagacatgggtctaaccaaatttccaaaaataatcaaaaaatcttgggcagacattgcctcagaatctgatgatgaatctgaatcaaatttacaaacaatgatccaaaatgcgtcaatgatcaaaacagtcaccaatactaaaggaaaactacctttagccaaagctcaaacaccacctaccaaacaaactaacaattatatttataaaaataaatttacaactgttttgcagatggaacctgaattttgggacaaaaatcccttcaaggcaacggccaaggctttcccaccaggatttcactacaaaccaaccaccgtcctaaagacaagaaccttttatgaattgattttggtagattcaaactcagtatctatcaaacatttcaaagacccaaaagaccaaacattaaacacccactcgacaatccaaatactaaaagttcttcaaccaagacactttggttcggacttgaacaaaggaaaaagattctcagttccatttgatccggtaggttatacctattgggattatgttgatgcttggactaaggtgttttggcaccaaaatacccgcttcaagcattcatggctgatatatttcaagaccaatacaatttacaattttcccaattggtttttacaatggtgggatttctttggaccaatcccagagatattcccagaaacagtccaacaaggatttgctcaatttgagagacaatacaattcacaggaatcacgaattccagcaaatcttaaatacttttcaagctttgcattgtcatggatattctcatggcaatatcgttacagcaagactgaaaagacaaatcaatatccatcactacaaagacacgcatttgtaaaatggtggacacaatttgactcatccaaagcggatccagaacaagtaaaactctggttccaatcccatccagaattcctcaaagcagctgatccagaaacttctgtgtttttaaaccaaaagtctcatctggcagcatttttagcgggatcgacatcaaatgaggtcttagcta

SEQ ID NO: 15676 - DNA, 1107 bp, Glycine max; identical to SEQ ID NO: 15675
  Gm_smallRNAprecursor_8509

SEQ ID NO: 15677 - DNA, 1108 bp, Glycine max
  Gm_smallRNAprecursor_8510
aaccggcaaccgccaaacaaacatcggccgactatgcatggccaactgaaacccttcaggcccttcaagacatgggtctaaccaaatttccaaaaataatcaaaaaatcttgggcagacattgcctcagaatctgatgatgaatctgaatcaaatttacaaacaatgatccaaaatgcgtcaatgatcaaaacagtcaccaatactaaaggaaaactacctttagccaaagctcaaacaccacctaccaaacaaactaacaattatatttataaaaataaatttacaactgttttgcagatggaacctgaattttgggacaaaaatcccttcaaggcaacggccaaggctttcccaccaggatttcactacaaaccaaccaccgtcctaaagacaagaaccttttatgaattgattttggtagattcaaactcagtatctatcaaacatttcaaagacccaaaagaccaaacattaaacacccactcgacaatccaaatactaaaagttcttcaaccaagacactttggttcggacttgaacaaaggaaaaagattctcagttccatttgatccggtaggttatacctattgggattatgttgatgcttggactaaggtgttttggcaccaaaatacccgcttcaagcattcatggctgatatatttcaagaccaatacaatttacaattttcccaattggtttttacaatggtgggatttctttggaccaatcccagagatattcccagaaacagtccaacaaggatttgctcaatttgagagacaatacaattcacaggaatcacgaattccagcaaatcttaaatacttttcaagctttgcattgtcatggatattctcatggcaatatcgttacagcaagactgaaaagacaaatcaatatccatcactacaaagacacgcatttgtaaaatggtggacacaatttgactcatccaaagcggatccagaacaagtaaaactctggttccaatcccatccagaattcctcaaagcagctgatccagaaacttctgtgtttttaaaccaaaagtctcatctggcagcatttttagcgggatcgacatcaaatgaggtcttagctaa

SEQ ID NO: 15678 - DNA, 1108 bp, Glycine max; identical to SEQ ID NO: 15677
  Gm_smallRNAprecursor_8511

SEQ ID NO: 15679 - DNA, 1102 bp, Glycine max
  Gm_smallRNAprecursor_8512
cggcaaccgccaaacaaacatcggccgactatgcatggccaactgaaacccttcaggcccttcaagacatgggtctaaccaaatttccaaaaataatcaaaaaatcttgggcagacattgcctcagaatctgatgatgaatctgaatcaaatttacaaacaatgatccaaaatgcgtcaatgatcaaaacagtcaccaatactaaaggaaaactacctttagccaaagctcaaacaccacctaccaaacaaactaacaattatatttataaaaataaatttacaactgttttgcagatggaacctgaattttgggacaaaaatcccttcaaggcaacggccaaggctttcccaccaggatttcactacaaaccaaccaccgtcctaaagacaagaaccttttatgaattgattttggtagattcaaactcagtatctatcaaacatttcaaagacccaaaagaccaaacattaaacacccactcgacaatccaaatactaaaagttcttcaaccaagacactttggttcggacttgaacaaaggaaaaagattctcagttccatttgatccggtaggttatacctattgggattatgttgatgcttggactaaggtgttttggcaccaaaatacccgcttcaagcattcatggctgatatatttcaagaccaatacaatttacaattttcccaattggtttttacaatggtgggatttctttggaccaatcccagagatattcccagaaacagtccaacaaggatttgctcaatttgagagacaatacaattcacaggaatcacgaattccagcaaatcttaaatacttttcaagctttgcattgtcatggatattctcatggcaatatcgttacagcaagactgaaaagacaaatcaatatccatcactacaaagacacgcatttgtaaaatggtggacacaatttgactcatccaaagcggatccagaacaagtaaaactctggttccaatcccatccagaattcctcaaagcagctgatccagaaacttctgtgtttttaaaccaaaagtctcatctggcagcatttttagcgggatcgacatcaaatgaggtcttagc

SEQ ID NO: 15680 - DNA, 1098 bp, Glycine max
  Gm_smallRNAprecursor_8513
caagacatgggtctaaccaaatttccaaaaataatcaaaaaatcttgggcagacattgcctcagaatctgatgatgaatctgaatcaaatttacaaacaatgatccaaaatgcgtcaatgatcaaaacagtcaccaatactaaaggaaaactacctttagccaaagctcaaacaccacctaccaaacaaactaacaattatatttataaaaataaatttacaactgttttgcagatggaacctgaattttgggacaaaaatcccttcaaggcaacggccaaggctttcccaccaggatttcactacaaaccaaccaccgtcctaaagacaagaaccttttatgaattgattttggtagattcaaactcagtatctatcaaacatttcaaagacccaaaagaccaaacattaaacacccactcgacaatccaaatactaaaagttcttcaaccaagacactttggttcggacttgaacaaaggaaaaagattctcagttccatttgatccggtaggttatacctattgggattatgttgatgcttggactaaggtgttttggcaccaaaatacccgcttcaagcattcatggctgatatatttcaagaccaatacaatttacaattttcccaattggtttttacaatggtgggatttctttggaccaatcccagagatattcccagaaacagtccaacaaggatttgctcaatttgagagacaatacaattcacaggaatcacgaattccagcaaatcttaaatacttttcaagctttgcattgtcatggatattctcatggcaatatcgttacagcaagactgaaaagacaaatcaatatccatcactacaaagacacgcatttgtaaaatggtggacacaatttgactcatccaaagcggatccagaacaagtaaaactctggttccaatcccatccagaattcctcaaagcagctgatccagaaacttctgtgtttttaaaccaaaagtctcatctggcagcatttttagcgggatcgacatcaaatgaggtcttagctaaaaatctgaaggaagttctgcaaatgttacagcaggaagaagaaggttcatcctca

SEQ ID NO: 15681 - DNA, 1099 bp, Glycine max
  Gm_smallRNAprecursor_8514
caagacatgggtctaaccaaatttccaaaaataatcaaaaaatcttgggcagacattgcctcagaatctgatgatgaatctgaatcaaatttacaaacaatgatccaaaatgcgtcaatgatcaaaacagtcaccaatactaaaggaaaactacctttagccaaagctcaaacaccacctaccaaacaaactaacaattatatttataaaaataaatttacaactgttttgcagatggaacctgaattttgggacaaaaatcccttcaaggcaacggccaaggctttcccaccaggatttcactacaaaccaaccaccgtcctaaagacaagaaccttttatgaattgattttggtagattcaaactcagtatctatcaaacatttcaaagacccaaaagaccaaacattaaacacccactcgacaatccaaatactaaaagttcttcaaccaagacactttggttcggacttgaacaaaggaaaaagattctcagttccatttgatccggtaggttatacctattgggattatgttgatgcttggactaaggtgttttggcaccaaaatacccgcttcaagcattcatggctgatatatttcaagaccaatacaatttacaattttcccaattggtttttacaatggtgggatttctttggaccaatcccagagatattcccagaaacagtccaacaaggatttgctcaatttgagagacaatacaattcacaggaatcacgaattccagcaaatcttaaatacttttcaagctttgcattgtcatggatattctcatggcaatatcgttacagcaagactgaaaagacaaatcaatatccatcactacaaagacacgcatttgtaaaatggtggacacaatttgactcatccaaagcggatccagaacaagtaaaactctggttccaatcccatccagaattcctcaaagcagctgatccagaaacttctgtgtttttaaaccaaaagtctcatctggcagcatttttagcgggatcgacatcaaatgaggtcttagctaaaaatctgaaggaagttctgcaaatgttacagcaggaagaagaaggttcatcctcaa

SEQ ID NO: 15682 - DNA, 1190 bp, Glycine max
  Gm_smallRNAprecursor_8515
caatgatccaaaatgcgtcaatgatcaaaacagtcaccaatactaaaggaaaactacctttagccaaagctcaaacaccacctaccaaacaaactaacaattatatttataaaaataaatttacaactgttttgcagatggaacctgaattttgggacaaaaatcccttcaaggcaacggccaaggctttcccaccaggatttcactacaaaccaaccaccgtcctaaagacaagaaccttttatgaattgattttggtagattcaaactcagtatctatcaaacatttcaaagacccaaaagaccaaacattaaacacccactcgacaatccaaatactaaaagttcttcaaccaagacactttggttcggacttgaacaaaggaaaaagattctcagttccatttgatccggtaggttatacctattgggattatgttgatgcttggactaaggtgttttggcaccaaaatacccgcttcaagcattcatggctgatatatttcaagaccaatacaatttacaattttcccaattggtttttacaatggtgggatttctttggaccaatcccagagatattcccagaaacagtccaacaaggatttgctcaatttgagagacaatacaattcacaggaatcacgaattccagcaaatcttaaatacttttcaagctttgcattgtcatggatattctcatggcaatatcgttacagcaagactgaaaagacaaatcaatatccatcactacaaagacacgcatttgtaaaatggtggacacaatttgactcatccaaagcggatccagaacaagtaaaactctggttccaatcccatccagaattcctcaaagcagctgatccagaaacttctgtgtttttaaaccaaaagtctcatctggcagcatttttagcgggatcgacatcaaatgaggtcttagctaaaaatctgaaggaagttctgcaaatgttacagcaggaagaagaaggttcatcctcaaagaaggaagaaacaagttctgctgaagaagaagaagaagaccccttttaccaaaacgaagatgattgttttggtatctgtttagattaaatttaatttcggtcacaaaaccgttttgtttgtaattaatgtgtaattaatgctggacaatactacctgtcctgtagccattaaagtcccggtcaaaac

SEQ ID NO: 15683 - DNA, 1189 bp, Glycine max
  Gm_smallRNAprecursor_8516
aatgatccaaaatgcgtcaatgatcaaaacagtcaccaatactaaaggaaaactacctttagccaaagctcaaacaccacctaccaaacaaactaacaattatatttataaaaataaatttacaactgttttgcagatggaacctgaattttgggacaaaaatcccttcaaggcaacggccaaggctttcccaccaggatttcactacaaaccaaccaccgtcctaaagacaagaaccttttatgaattgattttggtagattcaaactcagtatctatcaaacatttcaaagacccaaaagaccaaacattaaacacccactcgacaatccaaatactaaaagttcttcaaccaagacactttggttcggacttgaacaaaggaaaaagattctcagttccatttgatccggtaggttatacctattgggattatgttgatgcttggactaaggtgttttggcaccaaaatacccgcttcaagcattcatggctgatatatttcaagaccaatacaatttacaattttcccaattggtttttacaatggtgggatttctttggaccaatcccagagatattcccagaaacagtccaacaaggatttgctcaatttgagagacaatacaattcacaggaatcacgaattccagcaaatcttaaatacttttcaagctttgcattgtcatggatattctcatggcaatatcgttacagcaagactgaaaagacaaatcaatatccatcactacaaagacacgcatttgtaaaatggtggacacaatttgactcatccaaagcggatccagaacaagtaaaactctggttccaatcccatccagaattcctcaaagcagctgatccagaaacttctgtgtttttaaaccaaaagtctcatctggcagcatttttagcgggatcgacatcaaatgaggtcttagctaaaaatctgaaggaagttctgcaaatgttacagcaggaagaagaaggttcatcctcaaagaaggaagaaacaagttctgctgaagaagaagaagaagaccccttttaccaaaacgaagatgattgttttggtatctgtttagattaaatttaatttcggtcacaaaaccgttttgtttgtaattaatgtgtaattaatgctggacaatactacctgtcctgtagccattaaagtcccggtcaaaac

SEQ ID NO: 15684 - DNA, 1078 bp, Glycine max
  Gm_smallRNAprecursor_8517
attcaaactcagtatctatcaaacatttcaaagacccaaaagaccaaacattaaacacccactcgacaatccaaatactaaaagttcttcaaccaagacactttggttcggacttgaacaaaggaaaaagattctcagttccatttgatccggtaggttatacctattgggattatgttgatgcttggactaaggtgttttggcaccaaaatacccgcttcaagcattcatggctgatatatttcaagaccaatacaatttacaattttcccaattggtttttacaatggtgggatttctttggaccaatcccagagatattcccagaaacagtccaacaaggatttgctcaatttgagagacaatacaattcacaggaatcacgaattccagcaaatcttaaatacttttcaagctttgcattgtcatggatattctcatggcaatatcgttacagcaagactgaaaagacaaatcaatatccatcactacaaagacacgcatttgtaaaatggtggacacaatttgactcatccaaagcggatccagaacaagtaaaactctggttccaatcccatccagaattcctcaaagcagctgatccagaaacttctgtgtttttaaaccaaaagtctcatctggcagcatttttagcgggatcgacatcaaatgaggtcttagctaaaaatctgaaggaagttctgcaaatgttacagcaggaagaagaaggttcatcctcaaagaaggaagaaacaagttctgctgaagaagaagaagaagaccccttttaccaaaacgaagatgattgttttggtatctgtttagattaaatttaatttcggtcacaaaaccgttttgtttgtaattaatgtgtaattaatgctggacaatactacctgtcctgtagccattaaagtcccggtcaaaactacttgtcctgtaacaaacagtcaaatagtcttggtcaaaactaccggcaactaccggtcttagatttttggctatataaggagtcgtcaagtatgttgtgaggcaccctttcacttagccatttttcaggtttctgaagagaggtgct

SEQ ID NO: 15685 - DNA, 1079 bp, Glycine max
  Gm_smallRNAprecursor_8518
attcaaactcagtatctatcaaacatttcaaagacccaaaagaccaaacattaaacacccactcgacaatccaaatactaaaagttcttcaaccaagacactttggttcggacttgaacaaaggaaaaagattctcagttccatttgatccggtaggttatacctattgggattatgttgatgcttggactaaggtgttttggcaccaaaatacccgcttcaagcattcatggctgatatatttcaagaccaatacaatttacaattttcccaattggtttttacaatggtgggatttctttggaccaatcccagagatattcccagaaacagtccaacaaggatttgctcaatttgagagacaatacaattcacaggaatcacgaattccagcaaatcttaaatacttttcaagctttgcattgtcatggatattctcatggcaatatcgttacagcaagactgaaaagacaaatcaatatccatcactacaaagacacgcatttgtaaaatggtggacacaatttgactcatccaaagcggatccagaacaagtaaaactctggttccaatcccatccagaattcctcaaagcagctgatccagaaacttctgtgtttttaaaccaaaagtctcatctggcagcatttttagcgggatcgacatcaaatgaggtcttagctaaaaatctgaaggaagttctgcaaatgttacagcaggaagaagaaggttcatcctcaaagaaggaagaaacaagttctgctgaagaagaagaagaagaccccttttaccaaaacgaagatgattgttttggtatctgtttagattaaatttaatttcggtcacaaaaccgttttgtttgtaattaatgtgtaattaatgctggacaatactacctgtcctgtagccattaaagtcccggtcaaaactacttgtcctgtaacaaacagtcaaatagtcttggtcaaaactaccggcaactaccggtcttagatttttggctatataaggagtcgtcaagtatgttgtgaggcaccctttcacttagccatttttcaggtttctgaagagaggtgctc

SEQ ID NO: 15686 - DNA, 1215 bp, Glycine max
  Gm_smallRNAprecursor_8519
tcttcaaccaagacactttggttcggacttgaacaaaggaaaaagattctcagttccatttgatccggtaggttatacctattgggattatgttgatgcttggactaaggtgttttggcaccaaaatacccgcttcaagcattcatggctgatatatttcaagaccaatacaatttacaattttcccaattggtttttacaatggtgggatttctttggaccaatcccagagatattcccagaaacagtccaacaaggatttgctcaatttgagagacaatacaattcacaggaatcacgaattccagcaaatcttaaatacttttcaagctttgcattgtcatggatattctcatggcaatatcgttacagcaagactgaaaagacaaatcaatatccatcactacaaagacacgcatttgtaaaatggtggacacaatttgactcatccaaagcggatccagaacaagtaaaactctggttccaatcccatccagaattcctcaaagcagctgatccagaaacttctgtgtttttaaaccaaaagtctcatctggcagcatttttagcgggatcgacatcaaatgaggtcttagctaaaaatctgaaggaagttctgcaaatgttacagcaggaagaagaaggttcatcctcaaagaaggaagaaacaagttctgctgaagaagaagaagaagaccccttttaccaaaacgaagatgattgttttggtatctgtttagattaaatttaatttcggtcacaaaaccgttttgtttgtaattaatgtgtaattaatgctggacaatactacctgtcctgtagccattaaagtcccggtcaaaactacttgtcctgtaacaaacagtcaaatagtcttggtcaaaactaccggcaactaccggtcttagatttttggctatataaggagtcgtcaagtatgttgtgaggcaccctttcacttagccatttttcaggtttctgaagagaggtgctctgaaacaagatttttgtaagcgcttctttcaagattcaataaatttctatttttcatccttctctcttctcccttcaccgatcctgtgcggctctgccgccgcttcggtttctttgtttatgaaaacctggggtttgtaagccagtctccggtgtgcccttgatatctgtttttcaagtttatattttcctttcatttatcatactgcattcttacttcct

SEQ ID NO: 15687 - DNA, 1216 bp, Glycine max
  Gm_smallRNAprecursor_8520
tcttcaaccaagacactttggttcggacttgaacaaaggaaaaagattctcagttccatttgatccggtaggttatacctattgggattatgttgatgcttggactaaggtgttttggcaccaaaatacccgcttcaagcattcatggctgatatatttcaagaccaatacaatttacaattttcccaattggtttttacaatggtgggatttctttggaccaatcccagagatattcccagaaacagtccaacaaggatttgctcaatttgagagacaatacaattcacaggaatcacgaattccagcaaatcttaaatacttttcaagctttgcattgtcatggatattctcatggcaatatcgttacagcaagactgaaaagacaaatcaatatccatcactacaaagacacgcatttgtaaaatggtggacacaatttgactcatccaaagcggatccagaacaagtaaaactctggttccaatcccatccagaattcctcaaagcagctgatccagaaacttctgtgtttttaaaccaaaagtctcatctggcagcatttttagcgggatcgacatcaaatgaggtcttagctaaaaatctgaaggaagttctgcaaatgttacagcaggaagaagaaggttcatcctcaaagaaggaagaaacaagttctgctgaagaagaagaagaagaccccttttaccaaaacgaagatgattgttttggtatctgtttagattaaatttaatttcggtcacaaaaccgttttgtttgtaattaatgtgtaattaatgctggacaatactacctgtcctgtagccattaaagtcccggtcaaaactacttgtcctgtaacaaacagtcaaatagtcttggtcaaaactaccggcaactaccggtcttagatttttggctatataaggagtcgtcaagtatgttgtgaggcaccctttcacttagccatttttcaggtttctgaagagaggtgctctgaaacaagatttttgtaagcgcttctttcaagattcaataaatttctatttttcatccttctctcttctcccttcaccgatcctgtgcggctctgccgccgcttcggtttctttgtttatgaaaacctggggtttgtaagccagtctccggtgtgcccttgatatctgtttttcaagtttatattttcctttcatttatcatactgcattcttacttccta

SEQ ID NO: 15688 - DNA, 1057 bp, Glycine max
  Gm_smallRNAprecursor_8521
atttcaagaccaatacaatttacaattttcccaattggtttttacaatggtgggatttctttggaccaatcccagagatattcccagaaacagtccaacaaggatttgctcaatttgagagacaatacaattcacaggaatcacgaattccagcaaatcttaaatacttttcaagctttgcattgtcatggatattctcatggcaatatcgttacagcaagactgaaaagacaaatcaatatccatcactacaaagacacgcatttgtaaaatggtggacacaatttgactcatccaaagcggatccagaacaagtaaaactctggttccaatcccatccagaattcctcaaagcagctgatccagaaacttctgtgtttttaaaccaaaagtctcatctggcagcatttttagcgggatcgacatcaaatgaggtcttagctaaaaatctgaaggaagttctgcaaatgttacagcaggaagaagaaggttcatcctcaaagaaggaagaaacaagttctgctgaagaagaagaagaagaccccttttaccaaaacgaagatgattgttttggtatctgtttagattaaatttaatttcggtcacaaaaccgttttgtttgtaattaatgtgtaattaatgctggacaatactacctgtcctgtagccattaaagtcccggtcaaaactacttgtcctgtaacaaacagtcaaatagtcttggtcaaaactaccggcaactaccggtcttagatttttggctatataaggagtcgtcaagtatgttgtgaggcaccctttcacttagccatttttcaggtttctgaagagaggtgctctgaaacaagatttttgtaagcgcttctttcaagattcaataaatttctatttttcatccttctctcttctcccttcaccgatcctgtgcggctctgccgccgcttcggtttctttgtttatgaaaacctggggtttgtaagccagtctccggtgtgcccttgatatctgtttttcaagtttatattttcctttcatttatcatactgcattcttactt

SEQ ID NO: 15689 - DNA, 1064 bp, Glycine max
  Gm_smallRNAprecursor_8522
atttcaagaccaatacaatttacaattttcccaattggtttttacaatggtgggatttctttggaccaatcccagagatattcccagaaacagtccaacaaggatttgctcaatttgagagacaatacaattcacaggaatcacgaattccagcaaatcttaaatacttttcaagctttgcattgtcatggatattctcatggcaatatcgttacagcaagactgaaaagacaaatcaatatccatcactacaaagacacgcatttgtaaaatggtggacacaatttgactcatccaaagcggatccagaacaagtaaaactctggttccaatcccatccagaattcctcaaagcagctgatccagaaacttctgtgtttttaaaccaaaagtctcatctggcagcatttttagcgggatcgacatcaaatgaggtcttagctaaaaatctgaaggaagttctgcaaatgttacagcaggaagaagaaggttcatcctcaaagaaggaagaaacaagttctgctgaagaagaagaagaagaccccttttaccaaaacgaagatgattgttttggtatctgtttagattaaatttaatttcggtcacaaaaccgttttgtttgtaattaatgtgtaattaatgctggacaatactacctgtcctgtagccattaaagtcccggtcaaaactacttgtcctgtaacaaacagtcaaatagtcttggtcaaaactaccggcaactaccggtcttagatttttggctatataaggagtcgtcaagtatgttgtgaggcaccctttcacttagccatttttcaggtttctgaagagaggtgctctgaaacaagatttttgtaagcgcttctttcaagattcaataaatttctatttttcatccttctctcttctcccttcaccgatcctgtgcggctctgccgccgcttcggtttctttgtttatgaaaacctggggtttgtaagccagtctccggtgtgcccttgatatctgtttttcaagtttatattttcctttcatttatcatactgcattcttacttcctatct

SEQ ID NO: 15690 - DNA, 1059 bp, Glycine max
  Gm_smallRNAprecursor_8523
tttcaagaccaatacaatttacaattttcccaattggtttttacaatggtgggatttctttggaccaatcccagagatattcccagaaacagtccaacaaggatttgctcaatttgagagacaatacaattcacaggaatcacgaattccagcaaatcttaaatacttttcaagctttgcattgtcatggatattctcatggcaatatcgttacagcaagactgaaaagacaaatcaatatccatcactacaaagacacgcatttgtaaaatggtggacacaatttgactcatccaaagcggatccagaacaagtaaaactctggttccaatcccatccagaattcctcaaagcagctgatccagaaacttctgtgtttttaaaccaaaagtctcatctggcagcatttttagcgggatcgacatcaaatgaggtcttagctaaaaatctgaaggaagttctgcaaatgttacagcaggaagaagaaggttcatcctcaaagaaggaagaaacaagttctgctgaagaagaagaagaagaccccttttaccaaaacgaagatgattgttttggtatctgtttagattaaatttaatttcggtcacaaaaccgttttgtttgtaattaatgtgtaattaatgctggacaatactacctgtcctgtagccattaaagtcccggtcaaaactacttgtcctgtaacaaacagtcaaatagtcttggtcaaaactaccggcaactaccggtcttagatttttggctatataaggagtcgtcaagtatgttgtgaggcaccctttcacttagccatttttcaggtttctgaagagaggtgctctgaaacaagatttttgtaagcgcttctttcaagattcaataaatttctatttttcatccttctctcttctcccttcaccgatcctgtgcggctctgccgccgcttcggtttctttgtttatgaaaacctggggtttgtaagccagtctccggtgtgcccttgatatctgtttttcaagtttatattttcctttcatttatcatactgcattcttacttcct

SEQ ID NO: 15691 - DNA, 1060 bp, Glycine max
  Gm_smallRNAprecursor_8524
tttcaagaccaatacaatttacaattttcccaattggtttttacaatggtgggatttctttggaccaatcccagagatattcccagaaacagtccaacaaggatttgctcaatttgagagacaatacaattcacaggaatcacgaattccagcaaatcttaaatacttttcaagctttgcattgtcatggatattctcatggcaatatcgttacagcaagactgaaaagacaaatcaatatccatcactacaaagacacgcatttgtaaaatggtggacacaatttgactcatccaaagcggatccagaacaagtaaaactctggttccaatcccatccagaattcctcaaagcagctgatccagaaacttctgtgtttttaaaccaaaagtctcatctggcagcatttttagcgggatcgacatcaaatgaggtcttagctaaaaatctgaaggaagttctgcaaatgttacagcaggaagaagaaggttcatcctcaaagaaggaagaaacaagttctgctgaagaagaagaagaagaccccttttaccaaaacgaagatgattgttttggtatctgtttagattaaatttaatttcggtcacaaaaccgttttgtttgtaattaatgtgtaattaatgctggacaatactacctgtcctgtagccattaaagtcccggtcaaaactacttgtcctgtaacaaacagtcaaatagtcttggtcaaaactaccggcaactaccggtcttagatttttggctatataaggagtcgtcaagtatgttgtgaggcaccctttcacttagccatttttcaggtttctgaagagaggtgctctgaaacaagatttttgtaagcgcttctttcaagattcaataaatttctatttttcatccttctctcttctcccttcaccgatcctgtgcggctctgccgccgcttcggtttctttgtttatgaaaacctggggtttgtaagccagtctccggtgtgcccttgatatctgtttttcaagtttatattttcctttcatttatcatactgcattcttacttccta

SEQ ID NO: 15692 - DNA, 1060 bp, Glycine max; identical to SEQ ID NO: 15691
  Gm_smallRNAprecursor_8525

SEQ ID NO: 15693 - DNA, 1063 bp, Glycine max
  Gm_smallRNAprecursor_8526
tttcaagaccaatacaatttacaattttcccaattggtttttacaatggtgggatttctttggaccaatcccagagatattcccagaaacagtccaacaaggatttgctcaatttgagagacaatacaattcacaggaatcacgaattccagcaaatcttaaatacttttcaagctttgcattgtcatggatattctcatggcaatatcgttacagcaagactgaaaagacaaatcaatatccatcactacaaagacacgcatttgtaaaatggtggacacaatttgactcatccaaagcggatccagaacaagtaaaactctggttccaatcccatccagaattcctcaaagcagctgatccagaaacttctgtgtttttaaaccaaaagtctcatctggcagcatttttagcgggatcgacatcaaatgaggtcttagctaaaaatctgaaggaagttctgcaaatgttacagcaggaagaagaaggttcatcctcaaagaaggaagaaacaagttctgctgaagaagaagaagaagaccccttttaccaaaacgaagatgattgttttggtatctgtttagattaaatttaatttcggtcacaaaaccgttttgtttgtaattaatgtgtaattaatgctggacaatactacctgtcctgtagccattaaagtcccggtcaaaactacttgtcctgtaacaaacagtcaaatagtcttggtcaaaactaccggcaactaccggtcttagatttttggctatataaggagtcgtcaagtatgttgtgaggcaccctttcacttagccatttttcaggtttctgaagagaggtgctctgaaacaagatttttgtaagcgcttctttcaagattcaataaatttctatttttcatccttctctcttctcccttcaccgatcctgtgcggctctgccgccgcttcggtttctttgtttatgaaaacctggggtttgtaagccagtctccggtgtgcccttgatatctgtttttcaagtttatattttcctttcatttatcatactgcattcttacttcctatct

SEQ ID NO: 15694 - DNA, 1056 bp, Glycine max
  Gm_smallRNAprecursor_8527
caagaccaatacaatttacaattttcccaattggtttttacaatggtgggatttctttggaccaatcccagagatattcccagaaacagtccaacaaggatttgctcaatttgagagacaatacaattcacaggaatcacgaattccagcaaatcttaaatacttttcaagctttgcattgtcatggatattctcatggcaatatcgttacagcaagactgaaaagacaaatcaatatccatcactacaaagacacgcatttgtaaaatggtggacacaatttgactcatccaaagcggatccagaacaagtaaaactctggttccaatcccatccagaattcctcaaagcagctgatccagaaacttctgtgtttttaaaccaaaagtctcatctggcagcatttttagcgggatcgacatcaaatgaggtcttagctaaaaatctgaaggaagttctgcaaatgttacagcaggaagaagaaggttcatcctcaaagaaggaagaaacaagttctgctgaagaagaagaagaagaccccttttaccaaaacgaagatgattgttttggtatctgtttagattaaatttaatttcggtcacaaaaccgttttgtttgtaattaatgtgtaattaatgctggacaatactacctgtcctgtagccattaaagtcccggtcaaaactacttgtcctgtaacaaacagtcaaatagtcttggtcaaaactaccggcaactaccggtcttagatttttggctatataaggagtcgtcaagtatgttgtgaggcaccctttcacttagccatttttcaggtttctgaagagaggtgctctgaaacaagatttttgtaagcgcttctttcaagattcaataaatttctatttttcatccttctctcttctcccttcaccgatcctgtgcggctctgccgccgcttcggtttctttgtttatgaaaacctggggtttgtaagccagtctccggtgtgcccttgatatctgtttttcaagtttatattttcctttcatttatcatactgcattcttacttcct

SEQ ID NO: 15695 - DNA, 1056 bp, Glycine max; identical to SEQ ID NO: 15694
  Gm_smallRNAprecursor_8528

SEQ ID NO: 15696 - DNA, 1057 bp, Glycine max
  Gm_smallRNAprecursor_8529
caagaccaatacaatttacaattttcccaattggtttttacaatggtgggatttctttggaccaatcccagagatattcccagaaacagtccaacaaggatttgctcaatttgagagacaatacaattcacaggaatcacgaattccagcaaatcttaaatacttttcaagctttgcattgtcatggatattctcatggcaatatcgttacagcaagactgaaaagacaaatcaatatccatcactacaaagacacgcatttgtaaaatggtggacacaatttgactcatccaaagcggatccagaacaagtaaaactctggttccaatcccatccagaattcctcaaagcagctgatccagaaacttctgtgtttttaaaccaaaagtctcatctggcagcatttttagcgggatcgacatcaaatgaggtcttagctaaaaatctgaaggaagttctgcaaatgttacagcaggaagaagaaggttcatcctcaaagaaggaagaaacaagttctgctgaagaagaagaagaagaccccttttaccaaaacgaagatgattgttttggtatctgtttagattaaatttaatttcggtcacaaaaccgttttgtttgtaattaatgtgtaattaatgctggacaatactacctgtcctgtagccattaaagtcccggtcaaaactacttgtcctgtaacaaacagtcaaatagtcttggtcaaaactaccggcaactaccggtcttagatttttggctatataaggagtcgtcaagtatgttgtgaggcaccctttcacttagccatttttcaggtttctgaagagaggtgctctgaaacaagatttttgtaagcgcttctttcaagattcaataaatttctatttttcatccttctctcttctcccttcaccgatcctgtgcggctctgccgccgcttcggtttctttgtttatgaaaacctggggtttgtaagccagtctccggtgtgcccttgatatctgtttttcaagtttatattttcctttcatttatcatactgcattcttacttccta

SEQ ID NO: 15697 - DNA, 1057 bp, Glycine max; identical to SEQ ID NO: 15696
  Gm_smallRNAprecursor_8530

SEQ ID NO: 15698 - DNA, 1057 bp, Glycine max; identical to SEQ ID NO: 15696
  Gm_smallRNAprecursor_8531

SEQ ID NO: 15699 - DNA, 1057 bp, Glycine max; identical to SEQ ID NO: 15696
  Gm_smallRNAprecursor_8532

SEQ ID NO: 15700 - DNA, 1088 bp, Glycine max
  Gm_smallRNAprecursor_8533
aaactctggttccaatcccatccagaattcctcaaagcagctgatccagaaacttctgtgtttttaaaccaaaagtctcatctggcagcatttttagcgggatcgacatcaaatgaggtcttagctaaaaatctgaaggaagttctgcaaatgttacagcaggaagaagaaggttcatcctcaaagaaggaagaaacaagttctgctgaagaagaagaagaagaccccttttaccaaaacgaagatgattgttttggtatctgtttagattaaatttaatttcggtcacaaaaccgttttgtttgtaattaatgtgtaattaatgctggacaatactacctgtcctgtagccattaaagtcccggtcaaaactacttgtcctgtaacaaacagtcaaatagtcttggtcaaaactaccggcaactaccggtcttagatttttggctatataaggagtcgtcaagtatgttgtgaggcaccctttcacttagccatttttcaggtttctgaagagaggtgctctgaaacaagatttttgtaagcgcttctttcaagattcaataaatttctatttttcatccttctctcttctcccttcaccgatcctgtgcggctctgccgccgcttcggtttctttgtttatgaaaacctggggtttgtaagccagtctccggtgtgcccttgatatctgtttttcaagtttatattttcctttcatttatcatactgcattcttacttcctatctgtccgtttgatcctactccgctgacctctggtatatatatatatatatatatatatatatatatatatatatatatatatatatatatatatatatatatattgaagaagtttcatatgtgttttaagttatggccatttgcaaactttaaaagctttaaatatagatggcactagaatgattaaagtgatataacaaatataatttaaatttcaattaaataaaaccaaaataaggggactgcaatagaaaaagaaagcattgtatctttcaaatttcaacaattaaaaggacagattttaggcaagagtcaagggacggtaggatgttaatttaataag

SEQ ID NO: 15701 - DNA, 1078 bp, Glycine max
  Gm_smallRNAprecursor_8534
gtgtatgaattgggagactatttgaaggcaagataatgtgtgatttattagtcgtgtctgctatatatatagatggttgtgatcgagcgattgcttaactttgtttacaaaaaaatagacacgcgtgaacatgtttcgtgtttatgtttccttcagaatgtgtagtcaagtcagtcaatgtgttgtcgcgctcaaactttaatacacatgcaagtcattatgtgttgtcaattatgacaatgatgtatgctacacgcgtaaatgatttttgttggaccaacaattttcttgcttaaccaaacgagtacttaataatattaactggttagtaatggattacaacaaattatatcgcataatgaatacaattacataaacaatgcatgtttagtcttcatttaggtcgacatagtgtcttttgaatgacatcaagcttgtgcattgctgcattctactaatatatggaattgtccactgctttgcctgagaataacaattgtttgaccacaacaacgctggaggcggtaagggacaatggtctttcaaataaacttgttgtacatcaacaaagattatatcatgcggtgaccgtgtcaaatgaacaagcgaagtcattgcataattgttatactaactatattcaatgtacctgaacaaaatgattttcaaacacgtgaccgacacatatcatgcggtgcccagaagaatcaggtggtggttaacttctaagagaaaaaaatgtcatgctttgttgtcgggacatcgatacaaggattacgttataccgtgatgcaatcacatatcccatctccgctatatccatccacttgtccacactaacctgaatcaaccaaacatacacatgtaagtaatttaaagtttgttttttaaaaaattaacctaaaaacataccttcgaaaacccattaacaagtagggacaactttaattgttcaaatctctctgtgccactgaagaggttcatgtactcatgcgaccacatgccaagttctttaatctattcattacgcactaacggccacgaattttcccccatacctaataaagcggcaatggac

SEQ ID NO: 15702 - DNA, 1092 bp, Glycine max
  Gm_smallRNAprecursor_8535
gtttgacttgcagtgcttcaggatgtgaaagaaattggagtgtgtttgagcaagtaattgtgacaaaactctaactatacttttgaattttatttaattttgatgatcaaattttatttggagtatatttgagattgaaatcaacatttatttgttatattgtagattcattccaaaaaaaagaaataggcttgagcacaagaggttgcatgatttggtgtttgtcaaatacaaccaacaattgaagcaaagatataatgcaagagatgaaattgatccaatttctgttaatgatattgatgtatgcaatgaatggctcgtgggagagatggatcaagatgatgataatgatgctcgaaatgatttggtatttgaagatgatgatgctctaaattgggcaactgtgtatcaggcttcgggggttggagagtgtaggatgtatactaggcggaaaaagcaaaaaacaagtgttgctgctgcccaaacttctaaaaaacaggcaatggttgttggatcttcatcaaggaagcaaaaagcagtccaagaaaatgatgaggatctagatgttgaggagaatattgatgttgaatctgaagaagaagaaatcatggtcaattttgaggcgtctgatggggaagagggagagggagatgctccattaccatatgataacaacgaagatgattatgttgggattggagaagatgattagagcctcaaccttcactttgcactttgcattatgtttttatcattttcttattttgaaatttgaactctttaatgagtttatttggtgttggtacttgattattgtatgaactcatgaaacttttttagtttatttgaatgcaatcctttgtttttttcaatttcaatgagtttatatatatgtttttttttttttgtctgccatgacatccgtcattttccgctacgccatccgccatatttttatggcgaatttttgactttcctccatgaaccgccattaacaacattgtatccagggggcaattccatgtaaatctcctcttcaatttctccatggaggaaggcatttttaacatcaaattgttgcaagttccaacc

SEQ ID NO: 15703 - DNA, 1092 bp, Glycine max; identical to SEQ ID NO: 15702
  Gm_smallRNAprecursor_8536

SEQ ID NO: 15704 - DNA, 1051 bp, Glycine max
  Gm_smallRNAprecursor_8537
aagacgaactccacaatgtggttgcagtcatggaagtgcatgccagtttgcgacaaagacgaactcaggcagaaggagaaagaagaagaacgatagggttcaagcgcgcgggttgtgcaatttcagatttttaatatataatgataacaacatcggtttttcaaaaacaaccgatgttaacatcaactaggtaacatcggttttcttaaaaccgatgtcaacatcaactctataacatcggtttttccaaaaccgatgttaagtactccatagtaacatcggttattaaaataaccgatgttaatatcgagtagttaacatcggtttcggaaaaaccgatgttaactaagtctacttatttacaaaaatgccaccgcgcttttgttagcatcggttttgtgaataaccgatgttaaccgtccgatgttatatctaaaaattgtagtagtggtggtgaatatcaagctaaacacttaccgtgttctcacgtcatggttgcctgtaaatctgtcaatgttgatctcatgacctatgtgccgatgttattcactttacaacacattttgcacatctacgaaaactcctttggtttattgtcacacgaattaatgtggcaagaatatgaaggagatcagtggggtcctaatccaaggagaaaaaggactgcaaatggtaatcctgtttcaactcgcattcctactgaaatggacgaagacaaaattgaacgagcaggtagaaaaaaatgtggactttgccagcaacatgctcatagcagaaaaaagtgtgctaatatatcctcatcttaattttttccttagccaaatgtgattgtttaaatattttattgataatgtagtataatgttcttctataaataaattgttaaaagctttagttttatcatttttaattaaatctaataatataaataaactaattatatttagtaaaataagtaaattaaaaattttaaaattcagattattatacaaaataaatatattattatacaaaattcagattttaaaacatatattcacccaaaaaatat

SEQ ID NO: 15705 - DNA, 1052 bp, Glycine max
  Gm_smallRNAprecursor_8538
aagacgaactccacaatgtggttgcagtcatggaagtgcatgccagtttgcgacaaagacgaactcaggcagaaggagaaagaagaagaacgatagggttcaagcgcgcgggttgtgcaatttcagatttttaatatataatgataacaacatcggtttttcaaaaacaaccgatgttaacatcaactaggtaacatcggttttcttaaaaccgatgtcaacatcaactctataacatcggtttttccaaaaccgatgttaagtactccatagtaacatcggttattaaaataaccgatgttaatatcgagtagttaacatcggtttcggaaaaaccgatgttaactaagtctacttatttacaaaaatgccaccgcgcttttgttagcatcggttttgtgaataaccgatgttaaccgtccgatgttatatctaaaaattgtagtagtggtggtgaatatcaagctaaacacttaccgtgttctcacgtcatggttgcctgtaaatctgtcaatgttgatctcatgacctatgtgccgatgttattcactttacaacacattttgcacatctacgaaaactcctttggtttattgtcacacgaattaatgtggcaagaatatgaaggagatcagtggggtcctaatccaaggagaaaaaggactgcaaatggtaatcctgtttcaactcgcattcctactgaaatggacgaagacaaaattgaacgagcaggtagaaaaaaatgtggactttgccagcaacatgctcatagcagaaaaaagtgtgctaatatatcctcatcttaattttttccttagccaaatgtgattgtttaaatattttattgataatgtagtataatgttcttctataaataaattgttaaaagctttagttttatcatttttaattaaatctaataatataaataaactaattatatttagtaaaataagtaaattaaaaattttaaaattcagattattatacaaaataaatatattattatacaaaattcagattttaaaacatatattcacccaaaaaatatc

SEQ ID NO: 15706 - DNA, 1158 bp, Glycine max
  Gm_smallRNAprecursor_8539
attaaagtttttttcacatgtattaaattttattttgcagtagcaatgacatcttcatcatcatcttcatcacatattaacattaagtctgaccccatcgatactgatgtattatggatgcaacctaagcatgtttcagaacatgtttggaatggggaagaagaaaggaaattacatatcagacgagttgtcctcacttatcaaggggaagaacaaattccaaagcaaatttttccttttcttcaacaatctggtttcggctggattatcaagatgggatacttaaaaataaatgtctcattaattagtgctctgatagaaagatgaaggccggaaacacatacgtttcacatgagatgcggagagtgtactattactctacaagacgtctttgtattgttaggtataagtgtggatggtttaccattaatcggtccaacaaatcttgattgggctgatttatgtgaggaattattgggagtcagaccacaagaaggtgaaattaaaggtagtgtggttaaattaagttggctggctcaccattttgatcaaataaataatgacgacgaagaagaacaagtacgaaggtttgcccgtgcatggatactgagattcattggaggtgtcttgtttgttgacaaaaccggtaacagagtttcgctaaggtaccttcaatttttacgtgactttgaagaatgtggcagatatgcatggggagctgccgtacttggttttctatacagagagatgtgcagtgccaccgattataaaactaaatcaatcggaggtatgtgcatcttactacaattgtgggcatgggaacgatgtccaaccttggctccaaagaggactccttcccaagtagaaaatacaccactagggcacatgtcagtcatttttaacagcttctttcatttcaatagaataaatggttttagggtatattaaattttattctttgtaggtggctgcaacgtggaaaccaacatatcggcaatgatgatgtgaaagtttttcgtcgcaagttggatattatgaaacgtcatgaggtaagaaccatgctattgtatttgtaaaataaaaaattatatgtgttattttactacaatgttcacaactatgttgttatatgcagtttgtgtgggagccttacccatc

SEQ ID NO: 15707 - DNA, 1155 bp, Glycine max
  Gm_smallRNAprecursor_8540
taaagtttttttcacatgtattaaattttattttgcagtagcaatgacatcttcatcatcatcttcatcacatattaacattaagtctgaccccatcgatactgatgtattatggatgcaacctaagcatgtttcagaacatgtttggaatggggaagaagaaaggaaattacatatcagacgagttgtcctcacttatcaaggggaagaacaaattccaaagcaaatttttccttttcttcaacaatctggtttcggctggattatcaagatgggatacttaaaaataaatgtctcattaattagtgctctgatagaaagatgaaggccggaaacacatacgtttcacatgagatgcggagagtgtactattactctacaagacgtctttgtattgttaggtataagtgtggatggtttaccattaatcggtccaacaaatcttgattgggctgatttatgtgaggaattattgggagtcagaccacaagaaggtgaaattaaaggtagtgtggttaaattaagttggctggctcaccattttgatcaaataaataatgacgacgaagaagaacaagtacgaaggtttgcccgtgcatggatactgagattcattggaggtgtcttgtttgttgacaaaaccggtaacagagtttcgctaaggtaccttcaatttttacgtgactttgaagaatgtggcagatatgcatggggagctgccgtacttggttttctatacagagagatgtgcagtgccaccgattataaaactaaatcaatcggaggtatgtgcatcttactacaattgtgggcatgggaacgatgtccaaccttggctccaaagaggactccttcccaagtagaaaatacaccactagggcacatgtcagtcatttttaacagcttctttcatttcaatagaataaatggttttagggtatattaaattttattctttgtaggtggctgcaacgtggaaaccaacatatcggcaatgatgatgtgaaagtttttcgtcgcaagttggatattatgaaacgtcatgaggtaagaaccatgctattgtatttgtaaaataaaaaattatatgtgttattttactacaatgttcacaactatgttgttatatgcagtttgtgtgggagccttacccat

SEQ ID NO: 15708 - DNA, 1036 bp, Glycine max
  Gm_smallRNAprecursor_8541
agaccacaagaaggtgaaattaaaggtagtgtggttaaattaagttggctggctcaccattttgatcaaataaataatgacgacgaagaagaacaagtacgaaggtttgcccgtgcatggatactgagattcattggaggtgtcttgtttgttgacaaaaccggtaacagagtttcgctaaggtaccttcaatttttacgtgactttgaagaatgtggcagatatgcatggggagctgccgtacttggttttctatacagagagatgtgcagtgccaccgattataaaactaaatcaatcggaggtatgtgcatcttactacaattgtgggcatgggaacgatgtccaaccttggctccaaagaggactccttcccaagtagaaaatacaccactagggcacatgtcagtcatttttaacagcttctttcatttcaatagaataaatggttttagggtatattaaattttattctttgtaggtggctgcaacgtggaaaccaacatatcggcaatgatgatgtgaaagtttttcgtcgcaagttggatattatgaaacgtcatgaggtaagaaccatgctattgtatttgtaaaataaaaaattatatgtgttattttactacaatgttcacaactatgttgttatatgcagtttgtgtgggagccttacccatcaaccgttatatcattgttgcctcccgtttgtttagtcggaagtctcgcgtggtatgcggtggtgccactaatttgtttccaagttattgagtggcaccaaccggacaaagtgttgagacaatttgggatgcatcaaccagttccagagtctccttcacaacccttaaacattcatggcataacattaaaagggaaacatgacgaaaattgggggcaattgttcgtctcaatgattcatcagtggaataatcgtcatgcatttagggtcgacgcttatccccgacaagaaggcctaaagatgtttgttgacctagaaaatgcaaagacggctacattggtattttttattttttttcaatat

SEQ ID NO: 15709 - DNA, 1179 bp, Glycine max
  Gm_smallRNAprecursor_8542
aacaaaccccaaatgacacaggttatgaataaattctctaaaatagttgtttattttatcttgataagggctacattgatatttttttttaaaaaaaaaaagactaaattgaacattttattaaaaaaagaaacagattgaatgaaacaaataaataaatgaatcaaattaataatttaatctacatctagttaaaatcaaataatgtatatattttaatcttttttcctcaggtgtaaaaccttgcttttcttatttaatatttaggacccacctcaatacgaatgtgagtgttgctaggtgcacccaacattattgttggtgcacccagcattttaagaaaatggcaaaattacccttgtttgatttttctcttacggatcaagttgatctggaagttgatccggaagagacttccggatcaagttgatccgtaacttccggatcaatcaaataaaattatacaatatatttaaagatatttattttgctaatcaatcaatcataatcataattcatgctaatcatcaatcatgccaatcaatcataattccctaaaagagtatatatccgagaaaactgaatctaattcaatcctaattggcataaattataattatatatagatatatcatcttttagggaattatgattgattagcatgattgattgattaacatgaattatgattatgattgattgattagcaaaataaatatctttaaatatcttgtataattaacaaaattttatttttccacttacggattaagttgatccagaagttacggatcaacttgatccgcaagagaaaaaccaagcaagagtaattttgtcattttttttataatgctgggtgcacctagcaacactctacgaatgttctcctatttatgaccctattcatcttttaggtccataagagaagatcaagatatctattttttttttaatttccttcaaaatcacatttcaccggcttcccaattgataaaggagaaccgcaagtgcactcgtcaagtaataatatcgaattcacaagtttagcgattatcataattaaaaataaaagctaaataattaggaaaaaattaaaatttatttggaaatatttaattagaaaattgaagtaaaacataaaatatagataaaagataaagataagaaataagtaaaaat

SEQ ID NO: 15710 - DNA, 1080 bp, Glycine max
  Gm_smallRNAprecursor_8543
aaaaggcatagacagcatgctgcagtttaggaactcggcagcctccttacaccaatggtctggtttccaaattgccccaaatcgactttctgcaaaattgattttgagtccagaagctaactcaaagcatctgaggattgtttttataaccttcatattttccattgtagcctcttcgaagaaaatagtatcatcggcatattgtaaaatactaactggctccttatttttccccactaggaagctattaaaccgctttctgtccacagcttctctcatcaaaccagttagaccttctgcaacaatgttaaacaacagtggtgcgaggggatcgccttgtcggaggcctctttgtggggagaattcgttaatagggctttcattaaccaaaatagacactgatgctgaatggaggcagcctctgatccaatgttgttaatggcggatggcggttcatggcggaaagtaaaaaatcctccataaaaatatggcggatggtgtagcggaaaatggcggatgtcatggcggaccaaaaaaaaaaaaaaaacttatatataaactcattgaaattgaaaaaaacaaaggattgcattcaaataaactaaaaaagtttcatgagttcatacaataatcaagtaccaacaccaaataaactcattaaagagttcaaataaactcagccatttaaaagaggactgaacagaaaaaaaaattgtggtgtcaaatacgaaaaaaaaatgggactgttaaaagtaaaaaggggtgtcaaatagcaaaaggaaaaaaaaagctgcagacagaaaacagggggtgtcaaacagcaaaaataaaactaaaacctacgccttcttcttcgcgacgccttcttcttcttcgcgacagcagcttcgtcttctccgcgagaactccttgctgcaggccgccgttcgtgacagatgcgtcgctgccggagctcgtcgccgccgtttgtgccggtgcgtcgctgccggaggtcatcgcggctgcgtgcgcgtgcggctgcgggtgtcgcggctgggtgcgcgtgtggggtgcgggagggacgccattttccgccacccc

SEQ ID NO: 15711 - DNA, 1079 bp, Glycine max
  Gm_smallRNAprecursor_8544
cattcatgcaaattctatatgacaatgttagacttagaggagctgttctgcttctaaataagtacaaagccaatcaaagaagagattatggaaaagcattcagaatatttgagcctctaaaaacttttcttctttttctttgaggagtgtaatgtggatcccaagtaaccaagaaaagcaatccgaaaattcaatttcaagcaaactgttctcaagttttcgagggatatagtaatagcagagcaaaaaaacactggaaaaagcttgtacctattgaaacaaaggataattaaaaatccaaaatgtatcaaaagcctagacaattttaatcactattgcctcttaacaatttgcgcactatgacaatcatgctctcataatgtaacaaaagacacattaggatactagtactgacactgacaccaaggttacatagtcccacatcgaaggagtttaggtagagacatcggtttatataactaagcgtgacatgtctggtcacgaccttacttgaacaggatctgttctataggctcgtacctctgtgtccttgagttctaaggagacaggaacctacgtctggtggatgaatcatgaccgtgtgatcagagcgtgattaacgggcctgatgagcttctcttaggaggagatcccatcttgggctgtagatgatcgttctcagatacttccatgtctgagatggtcacacggttgtctgacagaccttaaacttttttttttttttttttatttcaccattctacaatttttggctcattcatcgttgaaaaacagaccccaacttcatccttgttgccagatcttaagggctatgaatgttgtagctgaccatgcggccttccttgtcccttaacttacaattagccaattagttgttcatgtttttaattctccttggagagttcctgtttagttggctcctcctaacccaagaaaaaaaaaaaaaacaactcttcctaagttttgatatatgaaaaagatagagacccaattctaagtgaatcagcaaccagattattaacatcctgaattcccacaatattcatggatgataccag

SEQ ID NO: 15712 - DNA, 1080 bp, Glycine max
  Gm_smallRNAprecursor_8545
cattcatgcaaattctatatgacaatgttagacttagaggagctgttctgcttctaaataagtacaaagccaatcaaagaagagattatggaaaagcattcagaatatttgagcctctaaaaacttttcttctttttctttgaggagtgtaatgtggatcccaagtaaccaagaaaagcaatccgaaaattcaatttcaagcaaactgttctcaagttttcgagggatatagtaatagcagagcaaaaaaacactggaaaaagcttgtacctattgaaacaaaggataattaaaaatccaaaatgtatcaaaagcctagacaattttaatcactattgcctcttaacaatttgcgcactatgacaatcatgctctcataatgtaacaaaagacacattaggatactagtactgacactgacaccaaggttacatagtcccacatcgaaggagtttaggtagagacatcggtttatataactaagcgtgacatgtctggtcacgaccttacttgaacaggatctgttctataggctcgtacctctgtgtccttgagttctaaggagacaggaacctacgtctggtggatgaatcatgaccgtgtgatcagagcgtgattaacgggcctgatgagcttctcttaggaggagatcccatcttgggctgtagatgatcgttctcagatacttccatgtctgagatggtcacacggttgtctgacagaccttaaacttttttttttttttttttatttcaccattctacaatttttggctcattcatcgttgaaaaacagaccccaacttcatccttgttgccagatcttaagggctatgaatgttgtagctgaccatgcggccttccttgtcccttaacttacaattagccaattagttgttcatgtttttaattctccttggagagttcctgtttagttggctcctcctaacccaagaaaaaaaaaaaaaacaactcttcctaagttttgatatatgaaaaagatagagacccaattctaagtgaatcagcaaccagattattaacatcctgaattcccacaatattcatggatgataccaga

SEQ ID NO: 15713 - DNA, 1124 bp, Glycine max
  Gm_smallRNAprecursor_8546
aagagattatggaaaagcattcagaatatttgagcctctaaaaacttttcttctttttctttgaggagtgtaatgtggatcccaagtaaccaagaaaagcaatccgaaaattcaatttcaagcaaactgttctcaagttttcgagggatatagtaatagcagagcaaaaaaacactggaaaaagcttgtacctattgaaacaaaggataattaaaaatccaaaatgtatcaaaagcctagacaattttaatcactattgcctcttaacaatttgcgcactatgacaatcatgctctcataatgtaacaaaagacacattaggatactagtactgacactgacaccaaggttacatagtcccacatcgaaggagtttaggtagagacatcggtttatataactaagcgtgacatgtctggtcacgaccttacttgaacaggatctgttctataggctcgtacctctgtgtccttgagttctaaggagacaggaacctacgtctggtggatgaatcatgaccgtgtgatcagagcgtgattaacgggcctgatgagcttctcttaggaggagatcccatcttgggctgtagatgatcgttctcagatacttccatgtctgagatggtcacacggttgtctgacagaccttaaacttttttttttttttttttatttcaccattctacaatttttggctcattcatcgttgaaaaacagaccccaacttcatccttgttgccagatcttaagggctatgaatgttgtagctgaccatgcggccttccttgtcccttaacttacaattagccaattagttgttcatgtttttaattctccttggagagttcctgtttagttggctcctcctaacccaagaaaaaaaaaaaaaacaactcttcctaagttttgatatatgaaaaagatagagacccaattctaagtgaatcagcaaccagattattaacatcctgaattcccacaatattcatggatgataccagaacgtttctaaataatacatgtattgtacaattcatgctagatatgtatttatgttagttctcgttgtattttattattcttttacttctatttttaaaatcttgtatcaatacaaattagaat

SEQ ID NO: 15714 - DNA, 1040 bp, Glycine max
  Gm_smallRNAprecursor_8547
agttgagaatgttggaatcaacaaagtgctcattgatggaggagcggctgtcaacttaatgcctcgatctatgctctacaagatcgggaaacatgacactgatctatctgcccacaacattgtgctttcgaattatgagggtaaaactggctattctttgggagccattcaagtagatgttgctgtaggcagtatagttcgaccaactcttttcctggtgatacagtctaaggctaattttaacttgctattaggaagggagtggattcatggagttggagctgtgccatctacccttcaccagaagctcattatctggagggaagatgggattgtggaaaatatagaggcggatcaaagcttctataagtcagaggtcgataatgttactgcacaaacctttgacaaaaagttggctaacatagcgccttgtggtgacaaggaggctgttgtcgaatcgagtgacaatgttgtccactctgtcaaactccatcctacttatgggtttatatgggagagggaggaaattaatgatgttccctctgaagatggagtcattccaccaactgggtggaatatatatgaagattaatatgactgaggccgctgcatgggccagaattacggcttatatggccgaaaatagactaaatacggccttcgaggctgagtctcaacaaaatatggcagttgaagccaagatcgaagatcatgagaataaagaaacaaaggatcgaagactggattgcatatatgacgatgagccgctgggtttcgagaaaaatcccgtaagtgaggtgccaaagatgcaggctcaagatcctttggaagaggtcgatatgggagatggctcgattaaaaggccaacttatatcagtgccaatatcacctcaagtttaaaagaaaagctggtgcctcttcttagagagtttaaagactgttttgcttgggattaccacgaaatgcctgggttaagcagagaattggtcgaaatgaagttacctatcaaggagggaaaaagaccagtaaaacaactacca

SEQ ID NO: 15715 - DNA, 1114 bp, Glycine max
  Gm_smallRNAprecursor_8548
aatctaagtggcaaagctcagattttttcgccattacttcgactcaagaaagatgaaccattcaaatggaatgaagagcatcaaaaggctttcgatgaagttaaagaatatctgatcaagcctcctgtgttaatgcctcctagtcgaaacaagtctatgaaattgtatattgctgcgtctgacaagaccattggtagcatgttggctcaggaagatgatgatggcatagaacatgcaatttattatcttagtcgtgtactaaatgatgcagaaactagatatactgccatagaaaaactctgtctttgtctgtatttctcttgtgcaaaacttaagcaatatataaagcctgttgatgtttatgtgtattctcattatgatgttattaagcacatgttgtcaaaaccgattttacacagtagaattggaaaatgggctttagcattaacagaatattctttaacgtacaagcctttgaaatctgttaagggtcaaattgtggcagattttattgtagatcactcagtggtcgaaatgtcgcaagactatgtcgatacagagccatggattttgtatttcgatggttcgaaacacaaacatggaactggaattggagttttaataatatcccccaataaagttccaactaagttcaaatataaaatcaaagggctttgttctaataatgaggctgagtatgaagctctaattacaggccttgaaattttaattagcctgggggcaagaaatgttaatataagaggtgattcagaattagtgttgaggcaattaacacaagaatacaaatgtgttaatgaacacttagcaaaatattttgttatagcaagttctcttctgaatcatttcgattatatcaacattgagcatgtacctcgacaagaaaaccgagaagcaaatgatttagcccaaatagcttcagggtacaaaatgtcgaaggaaaagttaactcagttgatcgaaataaaagataaactggtgttaccagagccattaagcactaaattgccaatgccaaaacttgtgggggcaagtataccacaaaataatgaagatgaaagtatgaatgatcttcaggaaaaaattcaaattttgg

SEQ ID NO: 15716 - DNA, 1110 bp, Glycine max
  Gm_smallRNAprecursor_8549
tattgtagatcactcagtggtcgaaatgtcgcaagactatgtcgatacagagccatggattttgtatttcgatggttcgaaacacaaacatggaactggaattggagttttaataatatcccccaataaagttccaactaagttcaaatataaaatcaaagggctttgttctaataatgaggctgagtatgaagctctaattacaggccttgaaattttaattagcctgggggcaagaaatgttaatataagaggtgattcagaattagtgttgaggcaattaacacaagaatacaaatgtgttaatgaacacttagcaaaatattttgttatagcaagttctcttctgaatcatttcgattatatcaacattgagcatgtacctcgacaagaaaaccgagaagcaaatgatttagcccaaatagcttcagggtacaaaatgtcgaaggaaaagttaactcagttgatcgaaataaaagataaactggtgttaccagagccattaagcactaaattgccaatgccaaaacttgtgggggcaagtataccacaaaataatgaagatgaaagtatgaatgatcttcaggaaaaaattcaaattttggccattgacaatatgttagataatgattggagaaagtccattattgaatatttggaaaatccaataggcaatgtggctcgaaagatcaaatatagggctttaaattacgtgattgtgggaaatgatttgtttaaaaagactgcagaaggagtgttgttaaaatgtctaagtgaatcagaagcatacttggcagtttcccatgttcacagtggggcctgtggatcacatcaagcaggccataaaatgaaatggcttttatttcgacaaggtttgtattggccttcgatgttaaaagactgcatagaattcgctaaaggctgtcaggaatgccaaaagcatgcagggatacagcatgtacctgctagtgagttacattccataatcaaaccttggcctttcagaggatgggctttggacttaattggtgaaatcaagcctgcctcttctaagaaccagcgttatattatagttggtatcgattactttacaaaatggatcgaagcagt

SEQ ID NO: 15717 - DNA, 1082 bp, Glycine max
  Gm_smallRNAprecursor_8550
cagtggtcgaaatgtcgcaagactatgtcgatacagagccatggattttgtatttcgatggttcgaaacacaaacatggaactggaattggagttttaataatatcccccaataaagttccaactaagttcaaatataaaatcaaagggctttgttctaataatgaggctgagtatgaagctctaattacaggccttgaaattttaattagcctgggggcaagaaatgttaatataagaggtgattcagaattagtgttgaggcaattaacacaagaatacaaatgtgttaatgaacacttagcaaaatattttgttatagcaagttctcttctgaatcatttcgattatatcaacattgagcatgtacctcgacaagaaaaccgagaagcaaatgatttagcccaaatagcttcagggtacaaaatgtcgaaggaaaagttaactcagttgatcgaaataaaagataaactggtgttaccagagccattaagcactaaattgccaatgccaaaacttgtgggggcaagtataccacaaaataatgaagatgaaagtatgaatgatcttcaggaaaaaattcaaattttggccattgacaatatgttagataatgattggagaaagtccattattgaatatttggaaaatccaataggcaatgtggctcgaaagatcaaatatagggctttaaattacgtgattgtgggaaatgatttgtttaaaaagactgcagaaggagtgttgttaaaatgtctaagtgaatcagaagcatacttggcagtttcccatgttcacagtggggcctgtggatcacatcaagcaggccataaaatgaaatggcttttatttcgacaaggtttgtattggccttcgatgttaaaagactgcatagaattcgctaaaggctgtcaggaatgccaaaagcatgcagggatacagcatgtacctgctagtgagttacattccataatcaaaccttggcctttcagaggatgggctttggacttaattggtgaaatcaagcctgcctcttctaagaaccagcgttatattatagttggtatcgattactttacaaaa

SEQ ID NO: 15718 - DNA, 1058 bp, Glycine max
  Gm_smallRNAprecursor_8551
tatccgtgtatcactacattctacttctacttctagtttaaaacaagaaaagataatttactgtatcatattcttatcaccaaaccacataaaggtggtgagaaaggaaaatggctaggattgtgattggaaatctttttttttttttctataaacacttaaaaataagaaaaaatgaaatgcatttgtgaaaaaaatctttatacacaagttaaaatcatttagcttttcaaaaaaaaaaaatgttaagggaccattagtagcggcgacattaacggcgacattaacgacgacattagtcaaatattgaatcttttacatgagttagtccacacatgcacatggcatggtcgtggatagacatgaagcgtatcatgccataagaaatgggccattcaagttccagtttagtataaatagcagcgagaaatccctgcatacataatttgctgtggataagttcccaagttcctttcctttctctcaaggctaagaggcctagacatcaccacaaacaagtcaccaaagaaggaagagtgtcacagaatccgggtgatcttgtttgtggtgatgtctagaccttcctagacttgtcttttgtcggagttcactgtctccgtgttgcggtggcagccggagggatattttcaaactaagcatgtggatctcgcttcctagttatgctctagaagacttcatcaatgaacacaaagaggcagagtcaagatccaaagaagctcagggtgaagcagagcaacatgtcctttagctattaacaatatcaaggctataatcctcgtaagtaataacatctcctaaacactttcttgtaagaaaataatctcatctcctttctatacaacttacaaatatgtttaatactcgggttttttttcttcctcttcttaatatctgagttttgttgctatttattattattattatgaattttgagttttgtagcatacaagaagtatcactgtgaaccaagtagtaaaatgggtgcttccgttttcgccactggtcattttattcatgttccagcgagagtggatata

SEQ ID NO: 15719 - DNA, 1051 bp, Glycine max
  Gm_smallRNAprecursor_8552
ccgtgtatcactacattctacttctacttctagtttaaaacaagaaaagataatttactgtatcatattcttatcaccaaaccacataaaggtggtgagaaaggaaaatggctaggattgtgattggaaatctttttttttttttctataaacacttaaaaataagaaaaaatgaaatgcatttgtgaaaaaaatctttatacacaagttaaaatcatttagcttttcaaaaaaaaaaaatgttaagggaccattagtagcggcgacattaacggcgacattaacgacgacattagtcaaatattgaatcttttacatgagttagtccacacatgcacatggcatggtcgtggatagacatgaagcgtatcatgccataagaaatgggccattcaagttccagtttagtataaatagcagcgagaaatccctgcatacataatttgctgtggataagttcccaagttcctttcctttctctcaaggctaagaggcctagacatcaccacaaacaagtcaccaaagaaggaagagtgtcacagaatccgggtgatcttgtttgtggtgatgtctagaccttcctagacttgtcttttgtcggagttcactgtctccgtgttgcggtggcagccggagggatattttcaaactaagcatgtggatctcgcttcctagttatgctctagaagacttcatcaatgaacacaaagaggcagagtcaagatccaaagaagctcagggtgaagcagagcaacatgtcctttagctattaacaatatcaaggctataatcctcgtaagtaataacatctcctaaacactttcttgtaagaaaataatctcatctcctttctatacaacttacaaatatgtttaatactcgggttttttttcttcctcttcttaatatctgagttttgttgctatttattattattattatgaattttgagttttgtagcatacaagaagtatcactgtgaaccaagtagtaaaatgggtgcttccgttttcgccactggtcattttattcatgttccagcgagagtgga

SEQ ID NO: 15720 - DNA, 1112 bp, Glycine max
  Gm_smallRNAprecursor_8553
ttcattcccattttcaattatacagtggtggacttggttcacttttggagcaaatggttgaggttttatgtcggcatgtatcggatgagtcttcaactgttcggcgattatgtttgcgaggattagtacaggtcttgggtttcatcctatgatattttgtcatgactcatgtaaccatggtttctttattttcaattgtaattatttcaacatgaatttaactgtttgaaagcttgattgcttgccaattatctgctcttttttcaaattgattttcctatctaaagaatctgcttgattgctttccaatcatctactcacttatctttctgggcatttctgttgagatgaggattaactttttattcaaagtattaacttgtgaaaaagtttctatagactattgtatgccaaacaaattacaaaattactttcattgttcataagcttattcaatattatattgtaagagatgcagttactcaactgcaatctcaggtagtaagtaagctgttaggttagttatgaccgctgtcatagagacagcggaatctataatctataaataacgtaacagctcaactgctgtctctatgacaactgtcataactaaccaaactgcttactttctacccgagattgcagttgagtaactgcatctcttaccatactctaatattcattgaaaagtattgcatgtatatgataattgtgcatctgatatgatcattgaattgtgtcatgttatcagttagattttcaattctaggtagtatatctctatacacttttatgcttctcttttaaatcatcattaccatatttgaaattgcagatcccattgattcatattctgaagtatacggctcaagtcttgggtgttatattagctctactagatgatttagatgaatctgtacaattaactgctgtatcatgcttactgatggtgaggttctttacctcctgtttgattgtgtttaccttttcatccattctaaattcagttagttactttatgttttggctctgtgtagattctcaattcttcacctgatgatgcagttgagcccattctgcttaatctttcaatacggcttcgaaatcttcaa

SEQ ID NO: 15721 - DNA, 1082 bp, Glycine max
  Gm_smallRNAprecursor_8554
tcgctttgtcgtttttgctctttggtcgccatcgcgctcaggttgctagagtcaccaagacgccgagattatcgcgtattcttcgaaaacttgttcaccccttgtcattaacttgcgtagagctctacttccgatcacaggaggccccacaatatcgaggttattgcgtcctctttggaccattagttgtcaaccttcttaaaaatatcccgcaaattgagcaaacggtaatgaaaataggattgaagagttgtttttacctacaatgaaatagtgaattttattagggtgttgttaggtgcacccaatattattgatgcacccacacttaacatgaaaagacaaaaatacccttgtgtatttttaaaaatatttttgtgcaccctgctcattcaagttgatccgcataggttttagttgatccacagttgatatagatgatatgcaagcttctcatggatcaagttgatccacaagtagatttttaagacttacggatcaagttgatccgtaagtcttttacgaatcaagttgatccgtaagttttttacggatcaagttgatctgcaagttgatttataagacttacgaatcaagttgatccgcaagtcttttacggatcaacttgatccgcaagttgatttttaagacttatagatcaagttgatccttaagtcttaaaaatcaacttacgaatcaacttgatccataaagaaaaaaaaacagagataattttaccattttttaaaaatgctgggtgcaccaataataataccaggtgcacctagcaacactcattttattaccattcatggtaaccattaattttttttatttataaattgaggagatacactgttcgaaagaagcactgttcactagttaatttttttttttttaaagtcaaacattcgtacatttgagaaaaaaggagagctaaaatggtactaggccggcggggaaatgcagcgggacctgctgtgctgctgatgcaacgtgtgaacgaaaaaccgactgcgccacgcttcgaaaaagttaccaaaccgctaaaatataattaaaaaaaaacgaaccatcacaac

SEQ ID NO: 15722 - DNA, 1184 bp, Glycine max
  Gm_smallRNAprecursor_8555
agatgttttgtgggtccaaagccaaaatagtgggttgattggttatcttgggcagaattttggttcaatactactttcaatatttttgttggcatgacaccattctaggctttatatggaagagatcctcctactttgattaaagggtgcacttttacttccaagattgacgcagtgaatcagctactggtagccaaagatgtggtcttacaagagttaaagcggtataagagacagtaaatgtaaaataatactttatttgtacttaaaactgaaaatgaaatgctattcatgtacatgtaaccttgatagggttaagagaatgcctaaacctcttgttaccaaagtgtatgttaggcgccaacctggcagtaatagaaataactaaccgaattctgttaggaataactaaccgaattctgttagttaaagagtactataaataagagctctaacagattgtaaaggagtttttgggatttgggactaactgaattgggattcagttggagttggttacagaagttcaactgaattgggattcagttgaacctttttcagttgtaattctctgttctgagttcttcttctgtaaccaactctaactgaataccaattcaattagtcccaaatcccaatatgccaaaaactcctttacaatttgttagagctcttatttatagtactctttaactaacagaattcaattagttattcctaacagaattcggttagttatttctattactgccaggctggcgcctaacatacactttggtaacaagaggtttaggcattctcttaaccctatcaaggttacatgtacatgaatagcatttcattttcagttttaagtacaaataaagtattattttacatttactgtctcttatacattgaattgtttttagtacattataaagtgtttctgatttagtatcatgttgccaagtcttctatttcaacattatgattacagtcaagtttttgatcattggctatggaaatgtgaaaggatcaaagttacatgttaaaccgcaaaacataattgtgtgcctggatgcaattaagagcactagtttattgttagaatgagagaagtaaccaagtcaagtctgcatactagaatttataattaatatttttaaagttcaatgttaatttagacaaatttcctttatttg

SEQ ID NO: 15723 - DNA, 1053 bp, Glycine max
  Gm_smallRNAprecursor_8556
ggtaaggttgtattttataaaaatactagtgatattaaaaaaaagagagaaactattgatgatcatgtgagaataaagattcagtggggccgggtgaaatttaaaggtcaaatctatggtagcatgactgttatcagagccagtgggcacaaagcaagtatcccgaagtaaattaataaatatatttttgatgatgacaataaatgttactagagaatagaagagccaaaatgaaaggggaagggcgggcctgtatatttattcgaaagcatacgcaaagtacgtcgtggaagttcatattgcttctttagctcattttgggtctttaaagaatggccacttcaatactcaatgtcttaatttcttttccacactgacacacatctactaattgctctccttccatctcttcttcacgctatataaatatgcattagcttttctcatggcatgccactctcaaccctttccaatttggttcattggtggctaggtcttgctggagaagcagggcacgtgcaacattcctgatgcttgctccagcttattttgcacgtgctctccttttccagcttgattttcctaccattttatttcttcttctaagctcaccacactgcacaacccaattcaattcaattttggtaagatgatcaatgattcttggtaattgcagaaccaaggtggtcttccccttccccttttctctcatatatccctgcaaatgtaaatttcattattctccatgtatacatttttgcactactgatactgagtggcaaattcaaggggatatgacatatgagtggactttcattaataaaaaaattgactgttgccttcagaaacagagcttttcatgtgattcgttttttgcagggtcaattggaaattggaatgtatccatgcaaaacttcagactagttagaaacacaaggatttgaagagagatcacgtgttctgttcagaatcatgcctcttgagtgtacattgttctctgcttctgcttctccctcacaaatacacttcaaaattctaaatattgttttctta

SEQ ID NO: 15724 - DNA, 1082 bp, Glycine max
  Gm_smallRNAprecursor_8557
gcgtgtcccttgcatctatctcctcctgccccttaacgtaggtgaaaataacagtagcaccctctaatgaaaacaagttgcacactgctcgtccaattccagagtcacccccagttactacagctacctttccctaaaaaatatataaattagatttgaaggaaatatatataaataaataagcataaatacgtagttatagataacgggaggtaattaataattaaatgttatatatacatgaagtttatttgatggcttgtaatcggggctgttgtattggggtggtggattcatgagatactctttgccaggctgtgtgtcttgcttctggcggggaaactggttttcaccggaagccattctcgtcaacaagcttttggaattactaagaagcctgaaaatgtggttttggaagctgttgcttttgaatcgaaaggaagacatggagatgctttataacgagttaacgaaggaggtggtgacatcctatgaagcaccaacaccgacacggacaccggacacgacacggacacggacacgtgaatacctgtaatgtccaaaatatagaacgtagtacgggtgtcgtgtcggtgtcggacactgacacggacgcatgtcggacaccggacacgacgaaaggctgaagtgtccgtgcttcataggtgacatcttgtgttggtttcttgtaccggaagcatatcttatacatatagaatatagatatatgttttgtttaattaggaaaagaatgaaagaaaaaagagtaaaaaatattatcaagttgtttgataaaaaaaaaaaactttttcctcttatttaattgtggtaaagataatttaatattgagttacgtgatcttccatcgttccttttactctcctaaatgaaaaaaaaaaaaaaaaaaaaaacagtaaaccctacatatttcttttatgttttcgttcacgccagtgacatactaaatgagagaaaacaactgatttaaattattttccttctctgtccgttcccttacgtttctctcgttccaaacgtagcagtagaaaatgaatggcacactggacatttattttaggaca

SEQ ID NO: 15725 - DNA, 1082 bp, Glycine max; identical to SEQ ID NO: 15724
  Gm_smallRNAprecursor_8558

SEQ ID NO: 15726 - DNA, 1083 bp, Glycine max
  Gm_smallRNAprecursor_8559
gcgtgtcccttgcatctatctcctcctgccccttaacgtaggtgaaaataacagtagcaccctctaatgaaaacaagttgcacactgctcgtccaattccagagtcacccccagttactacagctacctttccctaaaaaatatataaattagatttgaaggaaatatatataaataaataagcataaatacgtagttatagataacgggaggtaattaataattaaatgttatatatacatgaagtttatttgatggcttgtaatcggggctgttgtattggggtggtggattcatgagatactctttgccaggctgtgtgtcttgcttctggcggggaaactggttttcaccggaagccattctcgtcaacaagcttttggaattactaagaagcctgaaaatgtggttttggaagctgttgcttttgaatcgaaaggaagacatggagatgctttataacgagttaacgaaggaggtggtgacatcctatgaagcaccaacaccgacacggacaccggacacgacacggacacggacacgtgaatacctgtaatgtccaaaatatagaacgtagtacgggtgtcgtgtcggtgtcggacactgacacggacgcatgtcggacaccggacacgacgaaaggctgaagtgtccgtgcttcataggtgacatcttgtgttggtttcttgtaccggaagcatatcttatacatatagaatatagatatatgttttgtttaattaggaaaagaatgaaagaaaaaagagtaaaaaatattatcaagttgtttgataaaaaaaaaaaactttttcctcttatttaattgtggtaaagataatttaatattgagttacgtgatcttccatcgttccttttactctcctaaatgaaaaaaaaaaaaaaaaaaaaaacagtaaaccctacatatttcttttatgttttcgttcacgccagtgacatactaaatgagagaaaacaactgatttaaattattttccttctctgtccgttcccttacgtttctctcgttccaaacgtagcagtagaaaatgaatggcacactggacatttattttaggacat

SEQ ID NO: 15727 - DNA, 1072 bp, Glycine max
  Gm_smallRNAprecursor_8560
gtcccttgcatctatctcctcctgccccttaacgtaggtgaaaataacagtagcaccctctaatgaaaacaagttgcacactgctcgtccaattccagagtcacccccagttactacagctacctttccctaaaaaatatataaattagatttgaaggaaatatatataaataaataagcataaatacgtagttatagataacgggaggtaattaataattaaatgttatatatacatgaagtttatttgatggcttgtaatcggggctgttgtattggggtggtggattcatgagatactctttgccaggctgtgtgtcttgcttctggcggggaaactggttttcaccggaagccattctcgtcaacaagcttttggaattactaagaagcctgaaaatgtggttttggaagctgttgcttttgaatcgaaaggaagacatggagatgctttataacgagttaacgaaggaggtggtgacatcctatgaagcaccaacaccgacacggacaccggacacgacacggacacggacacgtgaatacctgtaatgtccaaaatatagaacgtagtacgggtgtcgtgtcggtgtcggacactgacacggacgcatgtcggacaccggacacgacgaaaggctgaagtgtccgtgcttcataggtgacatcttgtgttggtttcttgtaccggaagcatatcttatacatatagaatatagatatatgttttgtttaattaggaaaagaatgaaagaaaaaagagtaaaaaatattatcaagttgtttgataaaaaaaaaaaactttttcctcttatttaattgtggtaaagataatttaatattgagttacgtgatcttccatcgttccttttactctcctaaatgaaaaaaaaaaaaaaaaaaaaaacagtaaaccctacatatttcttttatgttttcgttcacgccagtgacatactaaatgagagaaaacaactgatttaaattattttccttctctgtccgttcccttacgtttctctcgttccaaacgtagcagtagaaaatgaatggcacactggacatttatttt

SEQ ID NO: 15728 - DNA, 1073 bp, Glycine max
  Gm_smallRNAprecursor_8561
gtcccttgcatctatctcctcctgccccttaacgtaggtgaaaataacagtagcaccctctaatgaaaacaagttgcacactgctcgtccaattccagagtcacccccagttactacagctacctttccctaaaaaatatataaattagatttgaaggaaatatatataaataaataagcataaatacgtagttatagataacgggaggtaattaataattaaatgttatatatacatgaagtttatttgatggcttgtaatcggggctgttgtattggggtggtggattcatgagatactctttgccaggctgtgtgtcttgcttctggcggggaaactggttttcaccggaagccattctcgtcaacaagcttttggaattactaagaagcctgaaaatgtggttttggaagctgttgcttttgaatcgaaaggaagacatggagatgctttataacgagttaacgaaggaggtggtgacatcctatgaagcaccaacaccgacacggacaccggacacgacacggacacggacacgtgaatacctgtaatgtccaaaatatagaacgtagtacgggtgtcgtgtcggtgtcggacactgacacggacgcatgtcggacaccggacacgacgaaaggctgaagtgtccgtgcttcataggtgacatcttgtgttggtttcttgtaccggaagcatatcttatacatatagaatatagatatatgttttgtttaattaggaaaagaatgaaagaaaaaagagtaaaaaatattatcaagttgtttgataaaaaaaaaaaactttttcctcttatttaattgtggtaaagataatttaatattgagttacgtgatcttccatcgttccttttactctcctaaatgaaaaaaaaaaaaaaaaaaaaaacagtaaaccctacatatttcttttatgttttcgttcacgccagtgacatactaaatgagagaaaacaactgatttaaattattttccttctctgtccgttcccttacgtttctctcgttccaaacgtagcagtagaaaatgaatggcacactggacatttatttta

SEQ ID NO: 15729 - DNA, 1070 bp, Glycine max
  Gm_smallRNAprecursor_8562
tcccttgcatctatctcctcctgccccttaacgtaggtgaaaataacagtagcaccctctaatgaaaacaagttgcacactgctcgtccaattccagagtcacccccagttactacagctacctttccctaaaaaatatataaattagatttgaaggaaatatatataaataaataagcataaatacgtagttatagataacgggaggtaattaataattaaatgttatatatacatgaagtttatttgatggcttgtaatcggggctgttgtattggggtggtggattcatgagatactctttgccaggctgtgtgtcttgcttctggcggggaaactggttttcaccggaagccattctcgtcaacaagcttttggaattactaagaagcctgaaaatgtggttttggaagctgttgcttttgaatcgaaaggaagacatggagatgctttataacgagttaacgaaggaggtggtgacatcctatgaagcaccaacaccgacacggacaccggacacgacacggacacggacacgtgaatacctgtaatgtccaaaatatagaacgtagtacgggtgtcgtgtcggtgtcggacactgacacggacgcatgtcggacaccggacacgacgaaaggctgaagtgtccgtgcttcataggtgacatcttgtgttggtttcttgtaccggaagcatatcttatacatatagaatatagatatatgttttgtttaattaggaaaagaatgaaagaaaaaagagtaaaaaatattatcaagttgtttgataaaaaaaaaaaactttttcctcttatttaattgtggtaaagataatttaatattgagttacgtgatcttccatcgttccttttactctcctaaatgaaaaaaaaaaaaaaaaaaaaaacagtaaaccctacatatttcttttatgttttcgttcacgccagtgacatactaaatgagagaaaacaactgatttaaattattttccttctctgtccgttcccttacgtttctctcgttccaaacgtagcagtagaaaatgaatggcacactggacatttattt

SEQ ID NO: 15730 - DNA, 1070 bp, Glycine max; identical to SEQ ID NO: 15729
  Gm_smallRNAprecursor_8563

SEQ ID NO: 15731 - DNA, 1071 bp, Glycine max
  Gm_smallRNAprecursor_8564
tcccttgcatctatctcctcctgccccttaacgtaggtgaaaataacagtagcaccctctaatgaaaacaagttgcacactgctcgtccaattccagagtcacccccagttactacagctacctttccctaaaaaatatataaattagatttgaaggaaatatatataaataaataagcataaatacgtagttatagataacgggaggtaattaataattaaatgttatatatacatgaagtttatttgatggcttgtaatcggggctgttgtattggggtggtggattcatgagatactctttgccaggctgtgtgtcttgcttctggcggggaaactggttttcaccggaagccattctcgtcaacaagcttttggaattactaagaagcctgaaaatgtggttttggaagctgttgcttttgaatcgaaaggaagacatggagatgctttataacgagttaacgaaggaggtggtgacatcctatgaagcaccaacaccgacacggacaccggacacgacacggacacggacacgtgaatacctgtaatgtccaaaatatagaacgtagtacgggtgtcgtgtcggtgtcggacactgacacggacgcatgtcggacaccggacacgacgaaaggctgaagtgtccgtgcttcataggtgacatcttgtgttggtttcttgtaccggaagcatatcttatacatatagaatatagatatatgttttgtttaattaggaaaagaatgaaagaaaaaagagtaaaaaatattatcaagttgtttgataaaaaaaaaaaactttttcctcttatttaattgtggtaaagataatttaatattgagttacgtgatcttccatcgttccttttactctcctaaatgaaaaaaaaaaaaaaaaaaaaaacagtaaaccctacatatttcttttatgttttcgttcacgccagtgacatactaaatgagagaaaacaactgatttaaattattttccttctctgtccgttcccttacgtttctctcgttccaaacgtagcagtagaaaatgaatggcacactggacatttatttt

SEQ ID NO: 15732 - DNA, 1071 bp, Glycine max; identical to SEQ ID NO: 15731
  Gm_smallRNAprecursor_8565

SEQ ID NO: 15733 - DNA, 1072 bp, Glycine max
  Gm_smallRNAprecursor_8566
tcccttgcatctatctcctcctgccccttaacgtaggtgaaaataacagtagcaccctctaatgaaaacaagttgcacactgctcgtccaattccagagtcacccccagttactacagctacctttccctaaaaaatatataaattagatttgaaggaaatatatataaataaataagcataaatacgtagttatagataacgggaggtaattaataattaaatgttatatatacatgaagtttatttgatggcttgtaatcggggctgttgtattggggtggtggattcatgagatactctttgccaggctgtgtgtcttgcttctggcggggaaactggttttcaccggaagccattctcgtcaacaagcttttggaattactaagaagcctgaaaatgtggttttggaagctgttgcttttgaatcgaaaggaagacatggagatgctttataacgagttaacgaaggaggtggtgacatcctatgaagcaccaacaccgacacggacaccggacacgacacggacacggacacgtgaatacctgtaatgtccaaaatatagaacgtagtacgggtgtcgtgtcggtgtcggacactgacacggacgcatgtcggacaccggacacgacgaaaggctgaagtgtccgtgcttcataggtgacatcttgtgttggtttcttgtaccggaagcatatcttatacatatagaatatagatatatgttttgtttaattaggaaaagaatgaaagaaaaaagagtaaaaaatattatcaagttgtttgataaaaaaaaaaaactttttcctcttatttaattgtggtaaagataatttaatattgagttacgtgatcttccatcgttccttttactctcctaaatgaaaaaaaaaaaaaaaaaaaaaacagtaaaccctacatatttcttttatgttttcgttcacgccagtgacatactaaatgagagaaaacaactgatttaaattattttccttctctgtccgttcccttacgtttctctcgttccaaacgtagcagtagaaaatgaatggcacactggacatttatttta

SEQ ID NO: 15734 - DNA, 1072 bp, Glycine max; identical to SEQ ID NO: 15733
  Gm_smallRNAprecursor_8567

SEQ ID NO: 15735 - DNA, 1077 bp, Glycine max
  Gm_smallRNAprecursor_8568
tcccttgcatctatctcctcctgccccttaacgtaggtgaaaataacagtagcaccctctaatgaaaacaagttgcacactgctcgtccaattccagagtcacccccagttactacagctacctttccctaaaaaatatataaattagatttgaaggaaatatatataaataaataagcataaatacgtagttatagataacgggaggtaattaataattaaatgttatatatacatgaagtttatttgatggcttgtaatcggggctgttgtattggggtggtggattcatgagatactctttgccaggctgtgtgtcttgcttctggcggggaaactggttttcaccggaagccattctcgtcaacaagcttttggaattactaagaagcctgaaaatgtggttttggaagctgttgcttttgaatcgaaaggaagacatggagatgctttataacgagttaacgaaggaggtggtgacatcctatgaagcaccaacaccgacacggacaccggacacgacacggacacggacacgtgaatacctgtaatgtccaaaatatagaacgtagtacgggtgtcgtgtcggtgtcggacactgacacggacgcatgtcggacaccggacacgacgaaaggctgaagtgtccgtgcttcataggtgacatcttgtgttggtttcttgtaccggaagcatatcttatacatatagaatatagatatatgttttgtttaattaggaaaagaatgaaagaaaaaagagtaaaaaatattatcaagttgtttgataaaaaaaaaaaactttttcctcttatttaattgtggtaaagataatttaatattgagttacgtgatcttccatcgttccttttactctcctaaatgaaaaaaaaaaaaaaaaaaaaaacagtaaaccctacatatttcttttatgttttcgttcacgccagtgacatactaaatgagagaaaacaactgatttaaattattttccttctctgtccgttcccttacgtttctctcgttccaaacgtagcagtagaaaatgaatggcacactggacatttattttaggaca

SEQ ID NO: 15736 - DNA, 1077 bp, Glycine max; identical to SEQ ID NO: 15735
  Gm_smallRNAprecursor_8569

SEQ ID NO: 15737 - DNA, 1078 bp, Glycine max
  Gm_smallRNAprecursor_8570
tcccttgcatctatctcctcctgccccttaacgtaggtgaaaataacagtagcaccctctaatgaaaacaagttgcacactgctcgtccaattccagagtcacccccagttactacagctacctttccctaaaaaatatataaattagatttgaaggaaatatatataaataaataagcataaatacgtagttatagataacgggaggtaattaataattaaatgttatatatacatgaagtttatttgatggcttgtaatcggggctgttgtattggggtggtggattcatgagatactctttgccaggctgtgtgtcttgcttctggcggggaaactggttttcaccggaagccattctcgtcaacaagcttttggaattactaagaagcctgaaaatgtggttttggaagctgttgcttttgaatcgaaaggaagacatggagatgctttataacgagttaacgaaggaggtggtgacatcctatgaagcaccaacaccgacacggacaccggacacgacacggacacggacacgtgaatacctgtaatgtccaaaatatagaacgtagtacgggtgtcgtgtcggtgtcggacactgacacggacgcatgtcggacaccggacacgacgaaaggctgaagtgtccgtgcttcataggtgacatcttgtgttggtttcttgtaccggaagcatatcttatacatatagaatatagatatatgttttgtttaattaggaaaagaatgaaagaaaaaagagtaaaaaatattatcaagttgtttgataaaaaaaaaaaactttttcctcttatttaattgtggtaaagataatttaatattgagttacgtgatcttccatcgttccttttactctcctaaatgaaaaaaaaaaaaaaaaaaaaaacagtaaaccctacatatttcttttatgttttcgttcacgccagtgacatactaaatgagagaaaacaactgatttaaattattttccttctctgtccgttcccttacgtttctctcgttccaaacgtagcagtagaaaatgaatggcacactggacatttattttaggacat

SEQ ID NO: 15738 - DNA, 1078 bp, Glycine max; identical to SEQ ID NO: 15737
  Gm_smallRNAprecursor_8571

SEQ ID NO: 15739 - DNA, 1079 bp, Glycine max
  Gm_smallRNAprecursor_8572
tcccttgcatctatctcctcctgccccttaacgtaggtgaaaataacagtagcaccctctaatgaaaacaagttgcacactgctcgtccaattccagagtcacccccagttactacagctacctttccctaaaaaatatataaattagatttgaaggaaatatatataaataaataagcataaatacgtagttatagataacgggaggtaattaataattaaatgttatatatacatgaagtttatttgatggcttgtaatcggggctgttgtattggggtggtggattcatgagatactctttgccaggctgtgtgtcttgcttctggcggggaaactggttttcaccggaagccattctcgtcaacaagcttttggaattactaagaagcctgaaaatgtggttttggaagctgttgcttttgaatcgaaaggaagacatggagatgctttataacgagttaacgaaggaggtggtgacatcctatgaagcaccaacaccgacacggacaccggacacgacacggacacggacacgtgaatacctgtaatgtccaaaatatagaacgtagtacgggtgtcgtgtcggtgtcggacactgacacggacgcatgtcggacaccggacacgacgaaaggctgaagtgtccgtgcttcataggtgacatcttgtgttggtttcttgtaccggaagcatatcttatacatatagaatatagatatatgttttgtttaattaggaaaagaatgaaagaaaaaagagtaaaaaatattatcaagttgtttgataaaaaaaaaaaactttttcctcttatttaattgtggtaaagataatttaatattgagttacgtgatcttccatcgttccttttactctcctaaatgaaaaaaaaaaaaaaaaaaaaaacagtaaaccctacatatttcttttatgttttcgttcacgccagtgacatactaaatgagagaaaacaactgatttaaattattttccttctctgtccgttcccttacgtttctctcgttccaaacgtagcagtagaaaatgaatggcacactggacatttattttaggacatc

SEQ ID NO: 15740 - DNA, 1079 bp, Glycine max; identical to SEQ ID NO: 15739
  Gm_smallRNAprecursor_8573

SEQ ID NO: 15741 - DNA, 1080 bp, Glycine max
  Gm_smallRNAprecursor_8574
tcccttgcatctatctcctcctgccccttaacgtaggtgaaaataacagtagcaccctctaatgaaaacaagttgcacactgctcgtccaattccagagtcacccccagttactacagctacctttccctaaaaaatatataaattagatttgaaggaaatatatataaataaataagcataaatacgtagttatagataacgggaggtaattaataattaaatgttatatatacatgaagtttatttgatggcttgtaatcggggctgttgtattggggtggtggattcatgagatactctttgccaggctgtgtgtcttgcttctggcggggaaactggttttcaccggaagccattctcgtcaacaagcttttggaattactaagaagcctgaaaatgtggttttggaagctgttgcttttgaatcgaaaggaagacatggagatgctttataacgagttaacgaaggaggtggtgacatcctatgaagcaccaacaccgacacggacaccggacacgacacggacacggacacgtgaatacctgtaatgtccaaaatatagaacgtagtacgggtgtcgtgtcggtgtcggacactgacacggacgcatgtcggacaccggacacgacgaaaggctgaagtgtccgtgcttcataggtgacatcttgtgttggtttcttgtaccggaagcatatcttatacatatagaatatagatatatgttttgtttaattaggaaaagaatgaaagaaaaaagagtaaaaaatattatcaagttgtttgataaaaaaaaaaaactttttcctcttatttaattgtggtaaagataatttaatattgagttacgtgatcttccatcgttccttttactctcctaaatgaaaaaaaaaaaaaaaaaaaaaacagtaaaccctacatatttcttttatgttttcgttcacgccagtgacatactaaatgagagaaaacaactgatttaaattattttccttctctgtccgttcccttacgtttctctcgttccaaacgtagcagtagaaaatgaatggcacactggacatttattttaggacatcc

SEQ ID NO: 15742 - DNA, 1080 bp, Glycine max; identical to SEQ ID NO: 15741
  Gm_smallRNAprecursor_8575

SEQ ID NO: 15743 - DNA, 1069 bp, Glycine max
  Gm_smallRNAprecursor_8576
cccttgcatctatctcctcctgccccttaacgtaggtgaaaataacagtagcaccctctaatgaaaacaagttgcacactgctcgtccaattccagagtcacccccagttactacagctacctttccctaaaaaatatataaattagatttgaaggaaatatatataaataaataagcataaatacgtagttatagataacgggaggtaattaataattaaatgttatatatacatgaagtttatttgatggcttgtaatcggggctgttgtattggggtggtggattcatgagatactctttgccaggctgtgtgtcttgcttctggcggggaaactggttttcaccggaagccattctcgtcaacaagcttttggaattactaagaagcctgaaaatgtggttttggaagctgttgcttttgaatcgaaaggaagacatggagatgctttataacgagttaacgaaggaggtggtgacatcctatgaagcaccaacaccgacacggacaccggacacgacacggacacggacacgtgaatacctgtaatgtccaaaatatagaacgtagtacgggtgtcgtgtcggtgtcggacactgacacggacgcatgtcggacaccggacacgacgaaaggctgaagtgtccgtgcttcataggtgacatcttgtgttggtttcttgtaccggaagcatatcttatacatatagaatatagatatatgttttgtttaattaggaaaagaatgaaagaaaaaagagtaaaaaatattatcaagttgtttgataaaaaaaaaaaactttttcctcttatttaattgtggtaaagataatttaatattgagttacgtgatcttccatcgttccttttactctcctaaatgaaaaaaaaaaaaaaaaaaaaaacagtaaaccctacatatttcttttatgttttcgttcacgccagtgacatactaaatgagagaaaacaactgatttaaattattttccttctctgtccgttcccttacgtttctctcgttccaaacgtagcagtagaaaatgaatggcacactggacatttattt

SEQ ID NO: 15744 - DNA, 1069 bp, Glycine max; identical to SEQ ID NO: 15743
  Gm_smallRNAprecursor_8577

SEQ ID NO: 15745 - DNA, 1069 bp, Glycine max; identical to SEQ ID NO: 15743
  Gm_smallRNAprecursor_8578

SEQ ID NO: 15746 - DNA, 1069 bp, Glycine max; identical to SEQ ID NO: 15743
  Gm_smallRNAprecursor_8579

SEQ ID NO: 15747 - DNA, 1071 bp, Glycine max
  Gm_smallRNAprecursor_8580
cccttgcatctatctcctcctgccccttaacgtaggtgaaaataacagtagcaccctctaatgaaaacaagttgcacactgctcgtccaattccagagtcacccccagttactacagctacctttccctaaaaaatatataaattagatttgaaggaaatatatataaataaataagcataaatacgtagttatagataacgggaggtaattaataattaaatgttatatatacatgaagtttatttgatggcttgtaatcggggctgttgtattggggtggtggattcatgagatactctttgccaggctgtgtgtcttgcttctggcggggaaactggttttcaccggaagccattctcgtcaacaagcttttggaattactaagaagcctgaaaatgtggttttggaagctgttgcttttgaatcgaaaggaagacatggagatgctttataacgagttaacgaaggaggtggtgacatcctatgaagcaccaacaccgacacggacaccggacacgacacggacacggacacgtgaatacctgtaatgtccaaaatatagaacgtagtacgggtgtcgtgtcggtgtcggacactgacacggacgcatgtcggacaccggacacgacgaaaggctgaagtgtccgtgcttcataggtgacatcttgtgttggtttcttgtaccggaagcatatcttatacatatagaatatagatatatgttttgtttaattaggaaaagaatgaaagaaaaaagagtaaaaaatattatcaagttgtttgataaaaaaaaaaaactttttcctcttatttaattgtggtaaagataatttaatattgagttacgtgatcttccatcgttccttttactctcctaaatgaaaaaaaaaaaaaaaaaaaaaacagtaaaccctacatatttcttttatgttttcgttcacgccagtgacatactaaatgagagaaaacaactgatttaaattattttccttctctgtccgttcccttacgtttctctcgttccaaacgtagcagtagaaaatgaatggcacactggacatttatttta

SEQ ID NO: 15748 - DNA, 1071 bp, Glycine max; identical to SEQ ID NO: 15747
  Gm_smallRNAprecursor_8581

SEQ ID NO: 15749 - DNA, 1076 bp, Glycine max
  Gm_smallRNAprecursor_8582
cccttgcatctatctcctcctgccccttaacgtaggtgaaaataacagtagcaccctctaatgaaaacaagttgcacactgctcgtccaattccagagtcacccccagttactacagctacctttccctaaaaaatatataaattagatttgaaggaaatatatataaataaataagcataaatacgtagttatagataacgggaggtaattaataattaaatgttatatatacatgaagtttatttgatggcttgtaatcggggctgttgtattggggtggtggattcatgagatactctttgccaggctgtgtgtcttgcttctggcggggaaactggttttcaccggaagccattctcgtcaacaagcttttggaattactaagaagcctgaaaatgtggttttggaagctgttgcttttgaatcgaaaggaagacatggagatgctttataacgagttaacgaaggaggtggtgacatcctatgaagcaccaacaccgacacggacaccggacacgacacggacacggacacgtgaatacctgtaatgtccaaaatatagaacgtagtacgggtgtcgtgtcggtgtcggacactgacacggacgcatgtcggacaccggacacgacgaaaggctgaagtgtccgtgcttcataggtgacatcttgtgttggtttcttgtaccggaagcatatcttatacatatagaatatagatatatgttttgtttaattaggaaaagaatgaaagaaaaaagagtaaaaaatattatcaagttgtttgataaaaaaaaaaaactttttcctcttatttaattgtggtaaagataatttaatattgagttacgtgatcttccatcgttccttttactctcctaaatgaaaaaaaaaaaaaaaaaaaaaacagtaaaccctacatatttcttttatgttttcgttcacgccagtgacatactaaatgagagaaaacaactgatttaaattattttccttctctgtccgttcccttacgtttctctcgttccaaacgtagcagtagaaaatgaatggcacactggacatttattttaggaca

SEQ ID NO: 15750 - DNA, 1076 bp, Glycine max; identical to SEQ ID NO: 15749
  Gm_smallRNAprecursor_8583

SEQ ID NO: 15751 - DNA, 1076 bp, Glycine max; identical to SEQ ID NO: 15749
  Gm_smallRNAprecursor_8584

SEQ ID NO: 15752 - DNA, 1076 bp, Glycine max; identical to SEQ ID NO: 15749
  Gm_smallRNAprecursor_8585

SEQ ID NO: 15753 - DNA, 1077 bp, Glycine max
  Gm_smallRNAprecursor_8586
cccttgcatctatctcctcctgccccttaacgtaggtgaaaataacagtagcaccctctaatgaaaacaagttgcacactgctcgtccaattccagagtcacccccagttactacagctacctttccctaaaaaatatataaattagatttgaaggaaatatatataaataaataagcataaatacgtagttatagataacgggaggtaattaataattaaatgttatatatacatgaagtttatttgatggcttgtaatcggggctgttgtattggggtggtggattcatgagatactctttgccaggctgtgtgtcttgcttctggcggggaaactggttttcaccggaagccattctcgtcaacaagcttttggaattactaagaagcctgaaaatgtggttttggaagctgttgcttttgaatcgaaaggaagacatggagatgctttataacgagttaacgaaggaggtggtgacatcctatgaagcaccaacaccgacacggacaccggacacgacacggacacggacacgtgaatacctgtaatgtccaaaatatagaacgtagtacgggtgtcgtgtcggtgtcggacactgacacggacgcatgtcggacaccggacacgacgaaaggctgaagtgtccgtgcttcataggtgacatcttgtgttggtttcttgtaccggaagcatatcttatacatatagaatatagatatatgttttgtttaattaggaaaagaatgaaagaaaaaagagtaaaaaatattatcaagttgtttgataaaaaaaaaaaactttttcctcttatttaattgtggtaaagataatttaatattgagttacgtgatcttccatcgttccttttactctcctaaatgaaaaaaaaaaaaaaaaaaaaaacagtaaaccctacatatttcttttatgttttcgttcacgccagtgacatactaaatgagagaaaacaactgatttaaattattttccttctctgtccgttcccttacgtttctctcgttccaaacgtagcagtagaaaatgaatggcacactggacatttattttaggacat

SEQ ID NO: 15754 - DNA, 1077 bp, Glycine max; identical to SEQ ID NO: 15753
  Gm_smallRNAprecursor_8587

SEQ ID NO: 15755 - DNA, 1078 bp, Glycine max
  Gm_smallRNAprecursor_8588
cccttgcatctatctcctcctgccccttaacgtaggtgaaaataacagtagcaccctctaatgaaaacaagttgcacactgctcgtccaattccagagtcacccccagttactacagctacctttccctaaaaaatatataaattagatttgaaggaaatatatataaataaataagcataaatacgtagttatagataacgggaggtaattaataattaaatgttatatatacatgaagtttatttgatggcttgtaatcggggctgttgtattggggtggtggattcatgagatactctttgccaggctgtgtgtcttgcttctggcggggaaactggttttcaccggaagccattctcgtcaacaagcttttggaattactaagaagcctgaaaatgtggttttggaagctgttgcttttgaatcgaaaggaagacatggagatgctttataacgagttaacgaaggaggtggtgacatcctatgaagcaccaacaccgacacggacaccggacacgacacggacacggacacgtgaatacctgtaatgtccaaaatatagaacgtagtacgggtgtcgtgtcggtgtcggacactgacacggacgcatgtcggacaccggacacgacgaaaggctgaagtgtccgtgcttcataggtgacatcttgtgttggtttcttgtaccggaagcatatcttatacatatagaatatagatatatgttttgtttaattaggaaaagaatgaaagaaaaaagagtaaaaaatattatcaagttgtttgataaaaaaaaaaaactttttcctcttatttaattgtggtaaagataatttaatattgagttacgtgatcttccatcgttccttttactctcctaaatgaaaaaaaaaaaaaaaaaaaaaacagtaaaccctacatatttcttttatgttttcgttcacgccagtgacatactaaatgagagaaaacaactgatttaaattattttccttctctgtccgttcccttacgtttctctcgttccaaacgtagcagtagaaaatgaatggcacactggacatttattttaggacatc

SEQ ID NO: 15756 - DNA, 1060 bp, Glycine max
  Gm_smallRNAprecursor_8589
tatctcctcctgccccttaacgtaggtgaaaataacagtagcaccctctaatgaaaacaagttgcacactgctcgtccaattccagagtcacccccagttactacagctacctttccctaaaaaatatataaattagatttgaaggaaatatatataaataaataagcataaatacgtagttatagataacgggaggtaattaataattaaatgttatatatacatgaagtttatttgatggcttgtaatcggggctgttgtattggggtggtggattcatgagatactctttgccaggctgtgtgtcttgcttctggcggggaaactggttttcaccggaagccattctcgtcaacaagcttttggaattactaagaagcctgaaaatgtggttttggaagctgttgcttttgaatcgaaaggaagacatggagatgctttataacgagttaacgaaggaggtggtgacatcctatgaagcaccaacaccgacacggacaccggacacgacacggacacggacacgtgaatacctgtaatgtccaaaatatagaacgtagtacgggtgtcgtgtcggtgtcggacactgacacggacgcatgtcggacaccggacacgacgaaaggctgaagtgtccgtgcttcataggtgacatcttgtgttggtttcttgtaccggaagcatatcttatacatatagaatatagatatatgttttgtttaattaggaaaagaatgaaagaaaaaagagtaaaaaatattatcaagttgtttgataaaaaaaaaaaactttttcctcttatttaattgtggtaaagataatttaatattgagttacgtgatcttccatcgttccttttactctcctaaatgaaaaaaaaaaaaaaaaaaaaaacagtaaaccctacatatttcttttatgttttcgttcacgccagtgacatactaaatgagagaaaacaactgatttaaattattttccttctctgtccgttcccttacgtttctctcgttccaaacgtagcagtagaaaatgaatggcacactggacatttatttt

SEQ ID NO: 15757 - DNA, 1061 bp, Glycine max
  Gm_smallRNAprecursor_8590
tatctcctcctgccccttaacgtaggtgaaaataacagtagcaccctctaatgaaaacaagttgcacactgctcgtccaattccagagtcacccccagttactacagctacctttccctaaaaaatatataaattagatttgaaggaaatatatataaataaataagcataaatacgtagttatagataacgggaggtaattaataattaaatgttatatatacatgaagtttatttgatggcttgtaatcggggctgttgtattggggtggtggattcatgagatactctttgccaggctgtgtgtcttgcttctggcggggaaactggttttcaccggaagccattctcgtcaacaagcttttggaattactaagaagcctgaaaatgtggttttggaagctgttgcttttgaatcgaaaggaagacatggagatgctttataacgagttaacgaaggaggtggtgacatcctatgaagcaccaacaccgacacggacaccggacacgacacggacacggacacgtgaatacctgtaatgtccaaaatatagaacgtagtacgggtgtcgtgtcggtgtcggacactgacacggacgcatgtcggacaccggacacgacgaaaggctgaagtgtccgtgcttcataggtgacatcttgtgttggtttcttgtaccggaagcatatcttatacatatagaatatagatatatgttttgtttaattaggaaaagaatgaaagaaaaaagagtaaaaaatattatcaagttgtttgataaaaaaaaaaaactttttcctcttatttaattgtggtaaagataatttaatattgagttacgtgatcttccatcgttccttttactctcctaaatgaaaaaaaaaaaaaaaaaaaaaacagtaaaccctacatatttcttttatgttttcgttcacgccagtgacatactaaatgagagaaaacaactgatttaaattattttccttctctgtccgttcccttacgtttctctcgttccaaacgtagcagtagaaaatgaatggcacactggacatttatttta

SEQ ID NO: 15758 - DNA, 1132 bp, Glycine max
  Gm_smallRNAprecursor_8591
tacaagattggtgttgaccactttggttccgactttgcaatggctcaaaggaaaacccattctcctagtaagaaacttttatcatactattttttttatgtattagtgttagaattcagaattctaagttatgctcttggttggtaattggtattgcagcatattggtggcgaatgtttgggtcacaaactccaaatttgcagaagctggctattaagattttgagtttgacttgcagtgcttcaggatgtgaaagaaattggagtgtgtttgagcaagtaattgtgacaaaactctaactatactttttaattttatttaattttgatgatcaagttatatttggagtatatttgagattgaaatcaacatttatttgttatgttgtagattcattccaaaaaaagaaataggcttgagcacaagaggttgcatgatttggtgtttgtcaaatacaaccaacaattgaagcaaagatataatgcaagagatgaaattgatccaatttctcttaatgatattgatgtatgcaatgaatggctcgtgggagagatggatcaagatgatgataatgatgctggaaatgatttggtatttgaagatgatgatgttctaaattgggcaactgtgtatcaggcttcgggggttggagagtgtaggatgtatactaggcggaaaaagcaaaaaacaagtgttgctgctgcccaaacttctaaaaaacaggcaatggttgttggatcttcatcaaggaagcaaaaagcagtccaagaaaatgatgaggatctagatgttgaggagaatattgatgttgaatctgaagaagaagaaatcatggtcaattttgaggcgtctgatggggaagagggagagggagatgctccattaccatatgataacaacgaagatgattatgttgggattggagaagatgattagagcctcaaccttcactttgcactttgcattatgtttttatcattttcttattttgaactctttaatgagtttatttggtgttggtacttgattattgtatgaactcatgaaacttttttagtttatttgaatgcaatcctttgtttttttcaatttcaatgagtttatatatatgttttttttttttttgtgtccg

SEQ ID NO: 15759 - DNA, 1092 bp, Glycine max
  Gm_smallRNAprecursor_8592
agtttgacttgcagtgcttcaggatgtgaaagaaattggagtgtgtttgagcaagtaattgtgacaaaactctaactatactttttaattttatttaattttgatgatcaagttatatttggagtatatttgagattgaaatcaacatttatttgttatgttgtagattcattccaaaaaaagaaataggcttgagcacaagaggttgcatgatttggtgtttgtcaaatacaaccaacaattgaagcaaagatataatgcaagagatgaaattgatccaatttctcttaatgatattgatgtatgcaatgaatggctcgtgggagagatggatcaagatgatgataatgatgctggaaatgatttggtatttgaagatgatgatgttctaaattgggcaactgtgtatcaggcttcgggggttggagagtgtaggatgtatactaggcggaaaaagcaaaaaacaagtgttgctgctgcccaaacttctaaaaaacaggcaatggttgttggatcttcatcaaggaagcaaaaagcagtccaagaaaatgatgaggatctagatgttgaggagaatattgatgttgaatctgaagaagaagaaatcatggtcaattttgaggcgtctgatggggaagagggagagggagatgctccattaccatatgataacaacgaagatgattatgttgggattggagaagatgattagagcctcaaccttcactttgcactttgcattatgtttttatcattttcttattttgaactctttaatgagtttatttggtgttggtacttgattattgtatgaactcatgaaacttttttagtttatttgaatgcaatcctttgtttttttcaatttcaatgagtttatatatatgttttttttttttttgtgtccgccatgacatccgccattttccgctacgccatccgccatatttttatggcggatttttgactttccgccatgaaccgccatccaccattaacaacattgctctgtacatattgtttattcacaactttatcattctatttttttctaatccagaatatcacctaactaaaaacatataatactaa

SEQ ID NO: 15760 - DNA, 1092 bp, Glycine max; identical to SEQ ID NO: 15759
  Gm_smallRNAprecursor_8593

SEQ ID NO: 15761 - DNA, 1080 bp, Glycine max
  Gm_smallRNAprecursor_8594
gggtatataagggtgttagagtctgaagggccaattggcaattggggggaaatatgaaatatgatttccaattagtgacacattctacctcttcattttgagtaaaaaaatagaatgtttccataagtcataaagtgattacctttgtaataaaatgaagagttgtagcgatagcttaattctgttatacttgtttctttggttgtcagaattcaagtcagttactaaggaagtatgcaagctgccatcttttttttccacatctcttttcagaaagatcgataatggaactggagttgtgacaaggtgtgtactttattattattattattattattttgatcagcaaaaatagatatatatatatatatgtatgtatgtatatatatatatatatatatatatatatatatatgtatgtatatatcaatgttgttaatggcggatggcggttcatggcggaaagtaaaaaatccgccataaaaatatggcggatggcgtagcggaaaatggcggatgtcatggcggacacaaaaaaaaaaaaaaacatatatataaactcattgaaattgaaaaaaacaaaggattgcattcaaataaactaaaaaagtttcatgagttcatacaataatcaagtaccaacaccaaataaactcattaaagagttcaaaaaagttgtagacagaaaaatggggggtgtcaaatagcaaaaggaaaaaaaaagttgtagacagaaaaatggggggtgtcaaatagcaaaaggaaaaaaaaaagctgtagacagaaaaatggggggtgtcaaacagcaaaaagcccaaaaaaaaaaaaaagaaacagatcagctgacccgcgtcttcttccttcctcttcttcgtcttcttcaaacgcgagacagaaaaatggggggtgtcgcgcgttgccggggctcgtcgacggaggtcgtcggcgccgttcgtgcgttgcgggcctcgtccggcggcggctgggtgcggcggggagggggtggtgtcgcggcggcggctgggagcggcggggttcgggagggacgcaggcaggttcgggagggaatggaagctgttg

SEQ ID NO: 15762 - DNA, 1057 bp, Glycine max
  Gm_smallRNAprecursor_8595
aaaaggactagttgttggctttgttacacaatagtactcctaaagggtgcaaagtgcagactattgtgagcttcatttatattttatagttaggactttgaaataaggttgaatttttatattattatcaaataaaagtaataatgtgtctgtgctgaattttaggaggagaattttgcagtttaccttttttttttttttcttacgaaattaaagcagacaaaactctagtttggtttccttcaatatccctaccttttggtatggtatggcagagttttatttatttaattttcctgcagagtaagacctgaatttcactcattgttcctgccaatgtccttagttagataaatctaattttttctctctctaaagttgcatctataaatatgagcctttcccttggtgcagttcaatttgagctttcattaccgttctcatgaagcttaaggtgcatgcaacggtctctacttactactggttgagaagctccttgttggagaagcagggcacgtgcaagtctcttggatctcaaatgccactgaaccctttgcacgtgctccccttctccaacacgggtttctccccttgtttttctcctaaccaattgtgtccagcacttatgaggtaattgctttcctcctatgtcttaatttgttcctacgtaaagttttacaatatgcatcttctttgagaaacgggctgaagcatgtcactttcaaattgaggtctccaatagctatatttagagggaaaattaaaaataaaaagaaggaagaagttttatgtatacaatattttactgatgttctctgtgtatcaatcatatcagcaggttctgaacttgaacaccttataagtttttgcgagttttggactgaaagttaaggtaatgtaactgaatgccagatacaaattaagcagacttatggcgttcggaggatgaggtttctgtggagtgtgatgcattacaaacttatgcaagaatatttcaaagtgtggagaaacacagcaaggcttgtcatgtgatcgaaaccttttggaaggattcata

SEQ ID NO: 15763 - DNA, 1049 bp, Glycine max
  Gm_smallRNAprecursor_8596
atgtgatcgacagacatatgagctaatttagtctttcatttgtattgaaaatcttaaggaaaaaaaatattaaatgtctagtttaggtgcgcacgtgatcacaagacagcatcttctcttcgctgagcttaccacttccccacccagatctgcaaagttgaatgccaaaacaaaactcactctcggatctttaaaaaaaatgaatgatcatatttgcaccactatatagctaggagcacaatcagctacaaacaccaaaaaaaaaaaaaacttgaataccaatgagcaacttcagatctgaacccaacacgaacaattaattagcaacataagattcaatccaagaacataattatataaataaaagatgcagatggaggacaagcatgtgtgtgaaattacagatgcaacccaggggagtgaagatccatactctagcagctgatctcccttgccgattcagatctgtaatctatctatgactgcactttgtttcatatgcgtgtgtaagtcatggctttctctcatatactcagatgagatacaagagaaagtcatgatttacaaacgcatagaaaccaacagaaaacttgaacgtacagctgtcaattcttacagacgtgccgcaatcttcattttagggtatctgatgaccatgcagcataacacacatatatatagacgagagatactagacctagtcacagttattgttacacttattaacttttacaaaaactattacaaggcagttgtaaatatcttttactacgtgattcactgtataaatattaaatattagatacatttttagggtgacacgagtaacgaaaatattatgtccactgatacacataatcaatttaaagaaaatatgattagtcttagcacaaaaattaatttaatttaaaaaaataaaaggaaaagtgcataggagagtaatatatttgacattttttattttaaaagaacaaaaaaatatatgtgacacacacatcttgaagaatataaaagagatgagagattatatgtgataagaaaaaaaagtc

SEQ ID NO: 15764 - DNA, 1137 bp, Glycine max
  Gm_smallRNAprecursor_8597
agagtaattaaattttactttgatgaaaatataaaaaaatgaatattcgatgatgcttggtgtgagtttcagtgagagattctggttaatttaattatgaatagatgtggtgtcacatttttcttaaatgacataatgaagtgcttgaataaaaaatacaaaatgaaactaaatttaaaattcatgtaatttaataagctcaataataaaacaccattaatcacttatgtatttgatgtgttgttagtgtaccttatgtttattgggcctttggtgggcttatgaacattaacttggggtgtgaatagaggaagtgggtagtaacttaggaaatatgcataacacaacccctcctacggccttaaaaatattttaaaaaaatcttagggtgttgttaggtgcacccagcatattgttggtacacccaacattttttgaaaatgtcaaaattgtccctacactttcttcgcatttgtgatgggtatgcgtgaggatgatctgtaaatcgtacagatcaagttgatccataaggttgatacggattatgttaatccgtatgttgatattaagcgcatacggatcaacttgatccataaaagacttacagatcaagttgatccataaggttgatacggatcaagttgatccgtatgttgatattaagcacatacagatcaacttgatccgtaaaaggcttacggattaagttgatccgtaaggttgatacggattaagttcatctgtatgttgatattaaacgcatatgaatcaacttaattcgtaagtcttttacggatcaacttaaaaggcttacggatcaaggatatttcagtcttttctccttaagtgttaggtgcaccggtaaaaatgctgagtgcatctagcaacacccaaaatcttattatcatccacacaatagcaaaaattgtacccacatttggtccaacaacttactaacccagggaagaaattcttaaatgttatgttgattaaagttggtcgagttcaaaagtacgtttctgaaaacaatttatttctttcttcatttgatgcatttaggtttgttttatcatgcattgaaattcataaaagtattttccaaactttaatccaagcataaccttaataattcgtgcc

SEQ ID NO: 15765 - DNA, 1231 bp, Glycine max
  Gm_smallRNAprecursor_8598
agagtaattaaattttactttgatgaaaatataaaaaaatgaatattcgatgatgcttggtgtgagtttcagtgagagattctggttaatttaattatgaatagatgtggtgtcacatttttcttaaatgacataatgaagtgcttgaataaaaaatacaaaatgaaactaaatttaaaattcatgtaatttaataagctcaataataaaacaccattaatcacttatgtatttgatgtgttgttagtgtaccttatgtttattgggcctttggtgggcttatgaacattaacttggggtgtgaatagaggaagtgggtagtaacttaggaaatatgcataacacaacccctcctacggccttaaaaatattttaaaaaaatcttagggtgttgttaggtgcacccagcatattgttggtacacccaacattttttgaaaatgtcaaaattgtccctacactttcttcgcatttgtgatgggtatgcgtgaggatgatctgtaaatcgtacagatcaagttgatccataaggttgatacggattatgttaatccgtatgttgatattaagcgcatacggatcaacttgatccataaaagacttacagatcaagttgatccataaggttgatacggatcaagttgatccgtatgttgatattaagcacatacagatcaacttgatccgtaaaaggcttacggattaagttgatccgtaaggttgatacggattaagttcatctgtatgttgatattaaacgcatatgaatcaacttaattcgtaagtcttttacggatcaacttaaaaggcttacggatcaaggatatttcagtcttttctccttaagtgttaggtgcaccggtaaaaatgctgagtgcatctagcaacacccaaaatcttattatcatccacacaatagcaaaaattgtacccacatttggtccaacaacttactaacccagggaagaaattcttaaatgttatgttgattaaagttggtcgagttcaaaagtacgtttctgaaaacaatttatttctttcttcatttgatgcatttaggtttgttttatcatgcattgaaattcataaaagtattttccaaactttaatccaagcataaccttaataattcgtgccaattcaattgtagtaacttacacacataaagttaaggtagaccataagcgaagagtttatttcctacaaaaaccaagagtgcaacaataattta

SEQ ID NO: 15766 - DNA, 1072 bp, Glycine max
  Gm_smallRNAprecursor_8599
gtttcagtgagagattctggttaatttaattatgaatagatgtggtgtcacatttttcttaaatgacataatgaagtgcttgaataaaaaatacaaaatgaaactaaatttaaaattcatgtaatttaataagctcaataataaaacaccattaatcacttatgtatttgatgtgttgttagtgtaccttatgtttattgggcctttggtgggcttatgaacattaacttggggtgtgaatagaggaagtgggtagtaacttaggaaatatgcataacacaacccctcctacggccttaaaaatattttaaaaaaatcttagggtgttgttaggtgcacccagcatattgttggtacacccaacattttttgaaaatgtcaaaattgtccctacactttcttcgcatttgtgatgggtatgcgtgaggatgatctgtaaatcgtacagatcaagttgatccataaggttgatacggattatgttaatccgtatgttgatattaagcgcatacggatcaacttgatccataaaagacttacagatcaagttgatccataaggttgatacggatcaagttgatccgtatgttgatattaagcacatacagatcaacttgatccgtaaaaggcttacggattaagttgatccgtaaggttgatacggattaagttcatctgtatgttgatattaaacgcatatgaatcaacttaattcgtaagtcttttacggatcaacttaaaaggcttacggatcaaggatatttcagtcttttctccttaagtgttaggtgcaccggtaaaaatgctgagtgcatctagcaacacccaaaatcttattatcatccacacaatagcaaaaattgtacccacatttggtccaacaacttactaacccagggaagaaattcttaaatgttatgttgattaaagttggtcgagttcaaaagtacgtttctgaaaacaatttatttctttcttcatttgatgcatttaggtttgttttatcatgcattgaaattcataaaagtattttccaaactttaatccaagcataaccttaataattcgtgcc

SEQ ID NO: 15767 - DNA, 1166 bp, Glycine max
  Gm_smallRNAprecursor_8600
gtttcagtgagagattctggttaatttaattatgaatagatgtggtgtcacatttttcttaaatgacataatgaagtgcttgaataaaaaatacaaaatgaaactaaatttaaaattcatgtaatttaataagctcaataataaaacaccattaatcacttatgtatttgatgtgttgttagtgtaccttatgtttattgggcctttggtgggcttatgaacattaacttggggtgtgaatagaggaagtgggtagtaacttaggaaatatgcataacacaacccctcctacggccttaaaaatattttaaaaaaatcttagggtgttgttaggtgcacccagcatattgttggtacacccaacattttttgaaaatgtcaaaattgtccctacactttcttcgcatttgtgatgggtatgcgtgaggatgatctgtaaatcgtacagatcaagttgatccataaggttgatacggattatgttaatccgtatgttgatattaagcgcatacggatcaacttgatccataaaagacttacagatcaagttgatccataaggttgatacggatcaagttgatccgtatgttgatattaagcacatacagatcaacttgatccgtaaaaggcttacggattaagttgatccgtaaggttgatacggattaagttcatctgtatgttgatattaaacgcatatgaatcaacttaattcgtaagtcttttacggatcaacttaaaaggcttacggatcaaggatatttcagtcttttctccttaagtgttaggtgcaccggtaaaaatgctgagtgcatctagcaacacccaaaatcttattatcatccacacaatagcaaaaattgtacccacatttggtccaacaacttactaacccagggaagaaattcttaaatgttatgttgattaaagttggtcgagttcaaaagtacgtttctgaaaacaatttatttctttcttcatttgatgcatttaggtttgttttatcatgcattgaaattcataaaagtattttccaaactttaatccaagcataaccttaataattcgtgccaattcaattgtagtaacttacacacataaagttaaggtagaccataagcgaagagtttatttcctacaaaaaccaagagtgcaacaataattta

SEQ ID NO: 15768 - DNA, 1251 bp, Glycine max
  Gm_smallRNAprecursor_8601
gtttcagtgagagattctggttaatttaattatgaatagatgtggtgtcacatttttcttaaatgacataatgaagtgcttgaataaaaaatacaaaatgaaactaaatttaaaattcatgtaatttaataagctcaataataaaacaccattaatcacttatgtatttgatgtgttgttagtgtaccttatgtttattgggcctttggtgggcttatgaacattaacttggggtgtgaatagaggaagtgggtagtaacttaggaaatatgcataacacaacccctcctacggccttaaaaatattttaaaaaaatcttagggtgttgttaggtgcacccagcatattgttggtacacccaacattttttgaaaatgtcaaaattgtccctacactttcttcgcatttgtgatgggtatgcgtgaggatgatctgtaaatcgtacagatcaagttgatccataaggttgatacggattatgttaatccgtatgttgatattaagcgcatacggatcaacttgatccataaaagacttacagatcaagttgatccataaggttgatacggatcaagttgatccgtatgttgatattaagcacatacagatcaacttgatccgtaaaaggcttacggattaagttgatccgtaaggttgatacggattaagttcatctgtatgttgatattaaacgcatatgaatcaacttaattcgtaagtcttttacggatcaacttaaaaggcttacggatcaaggatatttcagtcttttctccttaagtgttaggtgcaccggtaaaaatgctgagtgcatctagcaacacccaaaatcttattatcatccacacaatagcaaaaattgtacccacatttggtccaacaacttactaacccagggaagaaattcttaaatgttatgttgattaaagttggtcgagttcaaaagtacgtttctgaaaacaatttatttctttcttcatttgatgcatttaggtttgttttatcatgcattgaaattcataaaagtattttccaaactttaatccaagcataaccttaataattcgtgccaattcaattgtagtaacttacacacataaagttaaggtagaccataagcgaagagtttatttcctacaaaaaccaagagtgcaacaataatttacacttgaaatccatagaaccttcctctatagcacggtttaataatagccagttcaaatgtctacaaaacaaccgtacttttatgc

SEQ ID NO: 15769 - DNA, 1086 bp, Glycine max
  Gm_smallRNAprecursor_8602
atttgatgtgttgttagtgtaccttatgtttattgggcctttggtgggcttatgaacattaacttggggtgtgaatagaggaagtgggtagtaacttaggaaatatgcataacacaacccctcctacggccttaaaaatattttaaaaaaatcttagggtgttgttaggtgcacccagcatattgttggtacacccaacattttttgaaaatgtcaaaattgtccctacactttcttcgcatttgtgatgggtatgcgtgaggatgatctgtaaatcgtacagatcaagttgatccataaggttgatacggattatgttaatccgtatgttgatattaagcgcatacggatcaacttgatccataaaagacttacagatcaagttgatccataaggttgatacggatcaagttgatccgtatgttgatattaagcacatacagatcaacttgatccgtaaaaggcttacggattaagttgatccgtaaggttgatacggattaagttcatctgtatgttgatattaaacgcatatgaatcaacttaattcgtaagtcttttacggatcaacttaaaaggcttacggatcaaggatatttcagtcttttctccttaagtgttaggtgcaccggtaaaaatgctgagtgcatctagcaacacccaaaatcttattatcatccacacaatagcaaaaattgtacccacatttggtccaacaacttactaacccagggaagaaattcttaaatgttatgttgattaaagttggtcgagttcaaaagtacgtttctgaaaacaatttatttctttcttcatttgatgcatttaggtttgttttatcatgcattgaaattcataaaagtattttccaaactttaatccaagcataaccttaataattcgtgccaattcaattgtagtaacttacacacataaagttaaggtagaccataagcgaagagtttatttcctacaaaaaccaagagtgcaacaataatttacacttgaaatccatagaaccttcctctatagcacggtttaataatagccagttcaaatgtctacaaaacaaccgtacttttatgc

SEQ ID NO: 15770 - DNA, 1073 bp, Glycine max
  Gm_smallRNAprecursor_8603
agcattctaaaaaatggcaaaattgtccttgcttggttttcctcttacgggtcaagttgatccgtaaattgatccggaagtctcttccggatcaagttgatccgtaagaagaaaaataaaaattttgttaataatacaatatatttaaaggtatttattttgttaatcaatcaatcataatcataattcatgctaatcaatcaatcatgttaatcaattataatttcctaaaagaggatatatctatatataatcataattcattctaatcaatcaatcatgttaatcaatcataattcattctaatcaatcaatcatgttaatcaatcataattctaaaagaggatatatctatatataatcataattcatgctaatcaatcaatcataattccctaaaagaggatatatccgagaaaactaaatctaattcaatcataattagcataaattatgattatatatagatatatcctcttttagaaaattatgattgattagcatgaattatgattatgattgattgattaacatgaattatgattatgattgattagcaaaataaatatctttaaatatcttgtataattaataaaatttttatttttctcttacggataagttgatccggaagttacggatcaagttgatccggaagtctcttacagatcaagttgatccagaagagacttccgaatcaacttaatccgtaagagaaaaaccaaacaagaacaattttatcatttttttagaatgctgggtacaccaacaataatactgggtgcacttagcaacactctaattcggcccattcagtcccgtcacacaacccatttattttgtgggccgtagccataacaccaatgcccatttcccccaaattctcgtttcttctactcactgcactgcacttcacctcacttcaattccccaaaataccaaattccaatggcagaagcagaatccgaagcactgcgcctcaaggccatggcggagtccaagttcaaaggctccaacaataacgccaaatccgctctgaagtacgccaagcgcgcccaccgcctctgcccgca

SEQ ID NO: 15771 - DNA, 1063 bp, Glycine max
  Gm_smallRNAprecursor_8604
tctgctccattgtcaacatcattttctacattgttcgacaatttcttttcacttatgtttaatttgcagcataaatcatcatcattttggtgcaaaaaaaaaaaatattggtatggcatgcctgctcatgcagcttctcaatttgaaaatgttgtcttaaatcatgtgtatagtaatgataaaatcttgccaaaacatggagaggatggggcttttgaacttcttgggcataaaacaaccatgtttcctccaaatatcttgctacaaaatgatgtggaagtttacaaggcaacatgccaaaagagtttgtcatcacctttcctagagcatatcatgctggattcagtaatgataatctatctttgtgtgtgtgtgtttgtctctgccaaacattgacacatcaattcacctaacatttatcatttttttgttggttaggtttttaactgtggagaagcagtgaattttgcaactggtgattgctttccactagggtcggcagctagcaagtcttatacccatctcagaagttccttgtatgcaaatatgggagacattctgagattggcataacacttgctagcagcagcccctagtggaaagcaatcaccagttgcaaaattcactgtttcttcacagttaaaacctaaccaacaaaaataatgataaaaatattagtcctaggtgaattgtatgtgtaaatgtttggcagagaccagtgttgtaaaatagcagccatggcacaatgttgtggcggattttttgccaaccaccataggcaatttgtgaagggaggcccgccataaggtgcaatggcgtgtttatatgacagaatttcagccttccaccatgttccgccatccgccattgataacactggcacagacaaacacacacaatgccaccacaaccatcatgtctaccatcgccttcaacaccatcatcattgacgacacgaccaccgtcgttattgacgcaaccaccaccaccatcggccccattaccaccaccattggcaccaccgccactaccacctccactaccattgtcacttccgttaaca

SEQ ID NO: 15772 - DNA, 1079 bp, Glycine max
  Gm_smallRNAprecursor_8605
taaggaaattcctagaaccttctcttcttctagaagtttctccataatttttctttcctctattttctttgttttgggactgaaatttaaactttgactggaaggcattttcaattgtatcttctttatgcctatacagtctttactcatatgcttcaagagagcccacaagttctgtctctgatagagtggacagatctttggtttcctcaatcgttgtcacgattgggtcaaacttttggggcatagtaattagaattttctcaacaattttcttgtcaagaatatcttccccaaaagctctcatttgattaactatttctttaactttagaatagtaatctttaactgtctcagactccttcatcttcaatagttcaaaatctcttcttagagattgaagtttaacgacacgtaccttaacacttccttgaaactcctcctgcaatgtgttccatgcttctttggcagtcttagctcccataattcttgggaaaattggatcagtcaccgcttgttgcaaggtgaacaacgcctatgaatttttctgtttatttttcttcaactctttttcttgagatgcattaagagctgaagtatccgcgggaatggtgaagccttcttctactatgccccataaatcttgagatgaaaaatatgtttccattttaacacgccagaaatcataattttcaccattgaagatagggacagaaatatttgacgattgagtagtgttatccatagcttagaaaaaatattattagagtgggttaatagtacaaaggaaatttttgaagtagttggaaggattttggaatggtaggtaggtaatataactacgcccaatgtatgaccgaacgtagctcagataccactgttggtagttgattagatgatagttgatagttgatagttttagagaattgttttagaaagaaggctatgtcattgatttcttggattgtcaattacaacataccaattgcctatttataggctcaagtcaccaacctctcaatggtggtgaatgtttctacattaatttaggtctttctagagttttcatgatagattag

SEQ ID NO: 15773 - DNA, 1218 bp, Glycine max
  Gm_smallRNAprecursor_8606
ttaacagattaaattttgcaaagatattttcaaaatttgatatgaaatctggattttggcaaatccaaatccaagaatcagataggtacaaaacaacgtttactgtacctttcgggcaatatgaatggaatgtgatgccattcggactgaagaatgccccttcaaaatttcaaaaaattatgaatgatatttttaatccctattcaaaatttgtcattgtctacatagacgatgttttaatcttttcccaatacattgaccaacatttcaaacatctccagaccttcatccatatcatcaaacagaatggtttggcaatctccaaattaaaaatcaatcttttccaaactcgaattcgattccttggtcacaatatatatcaaggtacaatcattccaatagaaaggtcaattgagtttgctagcaaatttcccaaccaaaccttagacaaaacccagttacaaagatttctaggttgtctaaattacgtaggagaatttgtcccctatttaaacaatattgtcaagccattgcatgataggctgaagaaaattccacctccttggtctgacctccatacagaaacagttaaagaaatcaaagtcaaagttctatccataaaatgtctgtatcttcctattccacaaacatttaaaattgtcgaaactgatgcttcaaacataggttatggtggcatcctcaaacaaagagtccatggccaagatcatgtcattgcatatacatcaaaacattggaatcctgcacaattaaaatattcaactgttaaaaaggaagttttagcaattgttttgtgcatttccaaatttcaatcgaatttattaaaccaaaattttttaatcagagttgattgtaaatcagccaaagatattttacaaaaagatgttaaaaaccttgcctcaaaacaaatttttgcaagatggcaagcaattctaagtgtctttgattttgacatagaatacatcaagggcacctcaaattcattacctgacaaccttacccgtgaattcttacagaaaagtggtaatgcctcctaaggcatcaggaatctccctaaggggaggaagaagtacagtcaaaggagccagactggctcttccagagccaaccattaagaaatcatcaacctcttctaggtcaccaacccaggctgggtcatctacccagaaaaccaatttagaagggtcatcaacccagatt

SEQ ID NO: 15774 - DNA, 1115 bp, Glycine max
  Gm_smallRNAprecursor_8607
tcaattgagtttgctagcaaatttcccaaccaaaccttagacaaaacccagttacaaagatttctaggttgtctaaattacgtaggagaatttgtcccctatttaaacaatattgtcaagccattgcatgataggctgaagaaaattccacctccttggtctgacctccatacagaaacagttaaagaaatcaaagtcaaagttctatccataaaatgtctgtatcttcctattccacaaacatttaaaattgtcgaaactgatgcttcaaacataggttatggtggcatcctcaaacaaagagtccatggccaagatcatgtcattgcatatacatcaaaacattggaatcctgcacaattaaaatattcaactgttaaaaaggaagttttagcaattgttttgtgcatttccaaatttcaatcgaatttattaaaccaaaattttttaatcagagttgattgtaaatcagccaaagatattttacaaaaagatgttaaaaaccttgcctcaaaacaaatttttgcaagatggcaagcaattctaagtgtctttgattttgacatagaatacatcaagggcacctcaaattcattacctgacaaccttacccgtgaattcttacagaaaagtggtaatgcctcctaaggcatcaggaatctccctaaggggaggaagaagtacagtcaaaggagccagactggctcttccagagccaaccattaagaaatcatcaacctcttctaggtcaccaacccaggctgggtcatctacccagaaaaccaatttagaagggtcatcaacccagattacctcaatcaaacttgagccatccactcaggaatcccccaaaccagcaaccgccaaacaaacatcggccgactatgcatggccaattgaaacccttcaggcccttcaagacatgggtctaaccaaatttccaaaaataatcaaaaaatcttgggcagacattgcctcaaaatctaatgatgaatctaaatcaaatttacaaacaatgatccaaaatgcatcaatgaccaaaacagctaccgatcctaaaggggaactacctttagccaaaactcaaacaccacctaccaaacaaactaacaatt

SEQ ID NO: 15775 - DNA, 1112 bp, Glycine max
  Gm_smallRNAprecursor_8608
ttcccgagtgtccttcgcaaccactgaatatccatggcctaacgctgaaaggcaaacaagatgaaaattggttccaactgttggccccaatgatcagtcaatagaacaatcgacctgagtttagggttgacgtttatcctcgacaggagtggctattgacttttcactccgtctacatggtctggtataggcgaaaaacaaagatgtttgtcgacccaaagaatgcaaacacagctacattggtatttatttgtttttgaatatttaacttcaaattattttttgaagcatcggcattaatttcctgaccctaataattgcaggctgaagttgcggagacattatagtatatggtgtcaccacaagggaggaacacatggacagttgacgatctcctgccttatatggagaagataacgattttatctgaagagcaagagagaatcactgagcctgtggcacatggtccagcatcagagcgtcgatttccaccacaagagtttcacatgcttcagtcaagtgttgaaactcggggttttggcagacataggcaggctgttgaagcggaagaattttcccaacaaatggaggagcgtggccatggaatgtattacacgccaccaacattttctcagtatccttcacagatgtatcagtatcctttcgaaggtcatgacactgatatgtctgcaagcgaacattcgtttggtggtgttgcgaaaacacatcctcatttttcatggtcgactatgaccccatcacaacaacatgatgccccaatgccaacacccaacgccccattagctccgcaatggaatgtacccaaagcaatacctgatatgggtgacttattaggtgttgatttacgtcacgagttttttgctgaggctgagcaagtagaagcggggagacatcgtggcaaaagaaatcctgatcgtcaagcgcaaagatgggatcgatcatgtggcacatcctcacatcatcacggacaccataatgaatgattttgatgtctttgtttatatttgttgttgtatgtttgacatttgaatttgacacttaatctaacgtatctcatttattaagtgtgtccatggaatttatttcaactt

SEQ ID NO: 15776 - DNA, 1198 bp, Glycine max
  Gm_smallRNAprecursor_8609
acagaaagaaacatattgtcgatctcccttatgagaaagactttagggaaaaacaaattcccacaaaatccagaccaatccaaatgaatgaagaacttcttcaatattgtcaaaaggaaatcaaggatttgctcgataaaggcctaatccgaaaaagcaaaagcccatggtcttgtgcggctttttatgtcaacaaacaatctgagattgagcgtggaacaccccgcttagtcataaattacaaaccattaaatcaagcattacaatcgattagatatcctattccaaacaaaaaagatttgcttaacagattaaattctgcaaagatattttcaaattttgatatgaaatctggattttggcaaatccaaatccaagaatcagataggtacaaaacagcgtttactgtacctttcgggcaatatgaatggaatgtgatgccattcggactgaagaatgccccttcagaatttcaaaaatttatgaacgatatttttaatccctattcaaaatttgtcattgtctacatagatgatgttttaatcttttcccaaaacattgaccaacatttcaaacatctccaaaccttcatacatatcatcaaacaaaatggtttggcagtctccaaatcaaaaatcaatcttttccaaactcgaattcgattccttggtcacaatatatatcaaggtacaatcattccaatcgaaaggtcaatagagtttgctagcaaattccccaaccaaatcttagacaaaacccagttacaaagatttctaggttgtctaaattacgtaggagaatttgtcccctatttaaacaatattgtcaagccattgcatgataggctgaagaaaaatccgcctccttggtctgacctccatacacaaacggttaaagaaatcaaagtcaaagtccaatccattaaatgtctgtatcttcctattccacatgcatttaaaattgtcgaaactgatgcttcagacataggttatggtggcatcctcaaacaaagagtccatggccaagatcatgtcattgcatatacatcaaaacattggaatccttcacaattaaaatattcaactattaaaaaagaagttttagcaattgttttgtgcatttccaaatttcaatcggatttattaaaccaaaaatttttaatcagggttgattgtaaatcagccaaagatattttaca

SEQ ID NO: 15777 - DNA, 1234 bp, Glycine max
  Gm_smallRNAprecursor_8610
acagaaagaaacatattgtcgatctcccttatgagaaagactttagggaaaaacaaattcccacaaaatccagaccaatccaaatgaatgaagaacttcttcaatattgtcaaaaggaaatcaaggatttgctcgataaaggcctaatccgaaaaagcaaaagcccatggtcttgtgcggctttttatgtcaacaaacaatctgagattgagcgtggaacaccccgcttagtcataaattacaaaccattaaatcaagcattacaatcgattagatatcctattccaaacaaaaaagatttgcttaacagattaaattctgcaaagatattttcaaattttgatatgaaatctggattttggcaaatccaaatccaagaatcagataggtacaaaacagcgtttactgtacctttcgggcaatatgaatggaatgtgatgccattcggactgaagaatgccccttcagaatttcaaaaatttatgaacgatatttttaatccctattcaaaatttgtcattgtctacatagatgatgttttaatcttttcccaaaacattgaccaacatttcaaacatctccaaaccttcatacatatcatcaaacaaaatggtttggcagtctccaaatcaaaaatcaatcttttccaaactcgaattcgattccttggtcacaatatatatcaaggtacaatcattccaatcgaaaggtcaatagagtttgctagcaaattccccaaccaaatcttagacaaaacccagttacaaagatttctaggttgtctaaattacgtaggagaatttgtcccctatttaaacaatattgtcaagccattgcatgataggctgaagaaaaatccgcctccttggtctgacctccatacacaaacggttaaagaaatcaaagtcaaagtccaatccattaaatgtctgtatcttcctattccacatgcatttaaaattgtcgaaactgatgcttcagacataggttatggtggcatcctcaaacaaagagtccatggccaagatcatgtcattgcatatacatcaaaacattggaatccttcacaattaaaatattcaactattaaaaaagaagttttagcaattgttttgtgcatttccaaatttcaatcggatttattaaaccaaaaatttttaatcagggttgattgtaaatcagccaaagatattttacaaaaagatgttaaaaaccttgcctcaaaacaaatttt

SEQ ID NO: 15778 - DNA, 1107 bp, Glycine max
  Gm_smallRNAprecursor_8611
caatctgagattgagcgtggaacaccccgcttagtcataaattacaaaccattaaatcaagcattacaatcgattagatatcctattccaaacaaaaaagatttgcttaacagattaaattctgcaaagatattttcaaattttgatatgaaatctggattttggcaaatccaaatccaagaatcagataggtacaaaacagcgtttactgtacctttcgggcaatatgaatggaatgtgatgccattcggactgaagaatgccccttcagaatttcaaaaatttatgaacgatatttttaatccctattcaaaatttgtcattgtctacatagatgatgttttaatcttttcccaaaacattgaccaacatttcaaacatctccaaaccttcatacatatcatcaaacaaaatggtttggcagtctccaaatcaaaaatcaatcttttccaaactcgaattcgattccttggtcacaatatatatcaaggtacaatcattccaatcgaaaggtcaatagagtttgctagcaaattccccaaccaaatcttagacaaaacccagttacaaagatttctaggttgtctaaattacgtaggagaatttgtcccctatttaaacaatattgtcaagccattgcatgataggctgaagaaaaatccgcctccttggtctgacctccatacacaaacggttaaagaaatcaaagtcaaagtccaatccattaaatgtctgtatcttcctattccacatgcatttaaaattgtcgaaactgatgcttcagacataggttatggtggcatcctcaaacaaagagtccatggccaagatcatgtcattgcatatacatcaaaacattggaatccttcacaattaaaatattcaactattaaaaaagaagttttagcaattgttttgtgcatttccaaatttcaatcggatttattaaaccaaaaatttttaatcagggttgattgtaaatcagccaaagatattttacaaaaagatgttaaaaaccttgcctcaaaacaaatttttgcaagatggcaagcaattctaagtgtctttgattttgacatagaatacatcaagggcacctcaaattca

SEQ ID NO: 15779 - DNA, 1218 bp, Glycine max
  Gm_smallRNAprecursor_8612
ttaacagattaaattctgcaaagatattttcaaattttgatatgaaatctggattttggcaaatccaaatccaagaatcagataggtacaaaacagcgtttactgtacctttcgggcaatatgaatggaatgtgatgccattcggactgaagaatgccccttcagaatttcaaaaatttatgaacgatatttttaatccctattcaaaatttgtcattgtctacatagatgatgttttaatcttttcccaaaacattgaccaacatttcaaacatctccaaaccttcatacatatcatcaaacaaaatggtttggcagtctccaaatcaaaaatcaatcttttccaaactcgaattcgattccttggtcacaatatatatcaaggtacaatcattccaatcgaaaggtcaatagagtttgctagcaaattccccaaccaaatcttagacaaaacccagttacaaagatttctaggttgtctaaattacgtaggagaatttgtcccctatttaaacaatattgtcaagccattgcatgataggctgaagaaaaatccgcctccttggtctgacctccatacacaaacggttaaagaaatcaaagtcaaagtccaatccattaaatgtctgtatcttcctattccacatgcatttaaaattgtcgaaactgatgcttcagacataggttatggtggcatcctcaaacaaagagtccatggccaagatcatgtcattgcatatacatcaaaacattggaatccttcacaattaaaatattcaactattaaaaaagaagttttagcaattgttttgtgcatttccaaatttcaatcggatttattaaaccaaaaatttttaatcagggttgattgtaaatcagccaaagatattttacaaaaagatgttaaaaaccttgcctcaaaacaaatttttgcaagatggcaagcaattctaagtgtctttgattttgacatagaatacatcaagggcacctcaaattcattacctgactaccttacccgtgaattcttacagaaaagtggtaatgcctcctaaggcatcgggaatctccctacggggaggaaggagtacaagcaaaggagccagactggctcttccagagccaaccatcaagaaatcatcaacctcttctgggtcaccaacccaggctgggtcatctacccagaaaaccaatttagaaaggtcatcaacccagatt

SEQ ID NO: 15780 - DNA, 1073 bp, Glycine max
  Gm_smallRNAprecursor_8613
tgtacctttcgggcaatatgaatggaatgtgatgccattcggactgaagaatgccccttcagaatttcaaaaatttatgaacgatatttttaatccctattcaaaatttgtcattgtctacatagatgatgttttaatcttttcccaaaacattgaccaacatttcaaacatctccaaaccttcatacatatcatcaaacaaaatggtttggcagtctccaaatcaaaaatcaatcttttccaaactcgaattcgattccttggtcacaatatatatcaaggtacaatcattccaatcgaaaggtcaatagagtttgctagcaaattccccaaccaaatcttagacaaaacccagttacaaagatttctaggttgtctaaattacgtaggagaatttgtcccctatttaaacaatattgtcaagccattgcatgataggctgaagaaaaatccgcctccttggtctgacctccatacacaaacggttaaagaaatcaaagtcaaagtccaatccattaaatgtctgtatcttcctattccacatgcatttaaaattgtcgaaactgatgcttcagacataggttatggtggcatcctcaaacaaagagtccatggccaagatcatgtcattgcatatacatcaaaacattggaatccttcacaattaaaatattcaactattaaaaaagaagttttagcaattgttttgtgcatttccaaatttcaatcggatttattaaaccaaaaatttttaatcagggttgattgtaaatcagccaaagatattttacaaaaagatgttaaaaaccttgcctcaaaacaaatttttgcaagatggcaagcaattctaagtgtctttgattttgacatagaatacatcaagggcacctcaaattcattacctgactaccttacccgtgaattcttacagaaaagtggtaatgcctcctaaggcatcgggaatctccctacggggaggaaggagtacaagcaaaggagccagactggctcttccagagccaaccatcaagaaatcatcaacctcttctgggtcaccaacccaggctgggtca

SEQ ID NO: 15781 - DNA, 1071 bp, Glycine max
  Gm_smallRNAprecursor_8614
tacctttcgggcaatatgaatggaatgtgatgccattcggactgaagaatgccccttcagaatttcaaaaatttatgaacgatatttttaatccctattcaaaatttgtcattgtctacatagatgatgttttaatcttttcccaaaacattgaccaacatttcaaacatctccaaaccttcatacatatcatcaaacaaaatggtttggcagtctccaaatcaaaaatcaatcttttccaaactcgaattcgattccttggtcacaatatatatcaaggtacaatcattccaatcgaaaggtcaatagagtttgctagcaaattccccaaccaaatcttagacaaaacccagttacaaagatttctaggttgtctaaattacgtaggagaatttgtcccctatttaaacaatattgtcaagccattgcatgataggctgaagaaaaatccgcctccttggtctgacctccatacacaaacggttaaagaaatcaaagtcaaagtccaatccattaaatgtctgtatcttcctattccacatgcatttaaaattgtcgaaactgatgcttcagacataggttatggtggcatcctcaaacaaagagtccatggccaagatcatgtcattgcatatacatcaaaacattggaatccttcacaattaaaatattcaactattaaaaaagaagttttagcaattgttttgtgcatttccaaatttcaatcggatttattaaaccaaaaatttttaatcagggttgattgtaaatcagccaaagatattttacaaaaagatgttaaaaaccttgcctcaaaacaaatttttgcaagatggcaagcaattctaagtgtctttgattttgacatagaatacatcaagggcacctcaaattcattacctgactaccttacccgtgaattcttacagaaaagtggtaatgcctcctaaggcatcgggaatctccctacggggaggaaggagtacaagcaaaggagccagactggctcttccagagccaaccatcaagaaatcatcaacctcttctgggtcaccaacccaggctgggtca

SEQ ID NO: 15782 - DNA, 1115 bp, Glycine max
  Gm_smallRNAprecursor_8615
tcaatagagtttgctagcaaattccccaaccaaatcttagacaaaacccagttacaaagatttctaggttgtctaaattacgtaggagaatttgtcccctatttaaacaatattgtcaagccattgcatgataggctgaagaaaaatccgcctccttggtctgacctccatacacaaacggttaaagaaatcaaagtcaaagtccaatccattaaatgtctgtatcttcctattccacatgcatttaaaattgtcgaaactgatgcttcagacataggttatggtggcatcctcaaacaaagagtccatggccaagatcatgtcattgcatatacatcaaaacattggaatccttcacaattaaaatattcaactattaaaaaagaagttttagcaattgttttgtgcatttccaaatttcaatcggatttattaaaccaaaaatttttaatcagggttgattgtaaatcagccaaagatattttacaaaaagatgttaaaaaccttgcctcaaaacaaatttttgcaagatggcaagcaattctaagtgtctttgattttgacatagaatacatcaagggcacctcaaattcattacctgactaccttacccgtgaattcttacagaaaagtggtaatgcctcctaaggcatcgggaatctccctacggggaggaaggagtacaagcaaaggagccagactggctcttccagagccaaccatcaagaaatcatcaacctcttctgggtcaccaacccaggctgggtcatctacccagaaaaccaatttagaaaggtcatcaacccagattgcctcaatcaatcctgagccatccactcaggaatctcccaaaccggcaaccgccaaacaaacatcggctgactatgcatggccaattgaaacccttcaggcccttcaagacatgggtctgaccaaatttccaaaaataatcaaaaaatcttgggcagacattgcctcagaatctgatgatgaatctgaatcaaatttacaaacaatgatccaaaatgtgtcaatgaccaaaacaaccaccaatactagaggaaaactacctttagccaaagctcaaacaccacctaccaaacaaactaacaatt

SEQ ID NO: 15783 - DNA, 1174 bp, Glycine max
  Gm_smallRNAprecursor_8616
acaaagagtccatggccaagatcatgtcattgcatatacatcaaaacattggaatccttcacaattaaaatattcaactattaaaaaagaagttttagcaattgttttgtgcatttccaaatttcaatcggatttattaaaccaaaaatttttaatcagggttgattgtaaatcagccaaagatattttacaaaaagatgttaaaaaccttgcctcaaaacaaatttttgcaagatggcaagcaattctaagtgtctttgattttgacatagaatacatcaagggcacctcaaattcattacctgactaccttacccgtgaattcttacagaaaagtggtaatgcctcctaaggcatcgggaatctccctacggggaggaaggagtacaagcaaaggagccagactggctcttccagagccaaccatcaagaaatcatcaacctcttctgggtcaccaacccaggctgggtcatctacccagaaaaccaatttagaaaggtcatcaacccagattgcctcaatcaatcctgagccatccactcaggaatctcccaaaccggcaaccgccaaacaaacatcggctgactatgcatggccaattgaaacccttcaggcccttcaagacatgggtctgaccaaatttccaaaaataatcaaaaaatcttgggcagacattgcctcagaatctgatgatgaatctgaatcaaatttacaaacaatgatccaaaatgtgtcaatgaccaaaacaaccaccaatactagaggaaaactacctttagccaaagctcaaacaccacctaccaaacaaactaacaattatgtttataaaaataaattgttaactgttttgcagatggaacctgaattttgggacaaaaatcccttcaaggcgacggccaaggctttcccaccaggatttcactacaaaccaaccaccatcttgaagacaagaactttttatgaattgattttggtagattcaaactcagtatctatcaaacacttcaaagatccaaaagaccaaacattaaacacccactcgacaatccaaatattaaaagttcttcaaccaagacactttggtttggacttgaacaaaggaaagagattctcagtcccatttgatccggtaggttatacctattgggattacgttgatgcttggactaaggt

SEQ ID NO: 15784 - DNA, 1173 bp, Glycine max
  Gm_smallRNAprecursor_8617
caaagagtccatggccaagatcatgtcattgcatatacatcaaaacattggaatccttcacaattaaaatattcaactattaaaaaagaagttttagcaattgttttgtgcatttccaaatttcaatcggatttattaaaccaaaaatttttaatcagggttgattgtaaatcagccaaagatattttacaaaaagatgttaaaaaccttgcctcaaaacaaatttttgcaagatggcaagcaattctaagtgtctttgattttgacatagaatacatcaagggcacctcaaattcattacctgactaccttacccgtgaattcttacagaaaagtggtaatgcctcctaaggcatcgggaatctccctacggggaggaaggagtacaagcaaaggagccagactggctcttccagagccaaccatcaagaaatcatcaacctcttctgggtcaccaacccaggctgggtcatctacccagaaaaccaatttagaaaggtcatcaacccagattgcctcaatcaatcctgagccatccactcaggaatctcccaaaccggcaaccgccaaacaaacatcggctgactatgcatggccaattgaaacccttcaggcccttcaagacatgggtctgaccaaatttccaaaaataatcaaaaaatcttgggcagacattgcctcagaatctgatgatgaatctgaatcaaatttacaaacaatgatccaaaatgtgtcaatgaccaaaacaaccaccaatactagaggaaaactacctttagccaaagctcaaacaccacctaccaaacaaactaacaattatgtttataaaaataaattgttaactgttttgcagatggaacctgaattttgggacaaaaatcccttcaaggcgacggccaaggctttcccaccaggatttcactacaaaccaaccaccatcttgaagacaagaactttttatgaattgattttggtagattcaaactcagtatctatcaaacacttcaaagatccaaaagaccaaacattaaacacccactcgacaatccaaatattaaaagttcttcaaccaagacactttggtttggacttgaacaaaggaaagagattctcagtcccatttgatccggtaggttatacctattgggattacgttgatgcttggactaaggt

SEQ ID NO: 15785 - DNA, 1173 bp, Glycine max; identical to SEQ ID NO: 15784
  Gm_smallRNAprecursor_8618

SEQ ID NO: 15786 - DNA, 1159 bp, Glycine max
  Gm_smallRNAprecursor_8619
gacccatttttcaggaagagttacctcatcccattttattgtccttgggagagaaacattgacctttgtcatatcagtgataaacaaagttgtctctcctttttgaggttttaaaaggactctagacgcacaagtattcatgaccttgtactgtatcctataaattaaagttgttggaattgatcattctttcatgtcaaggccatgaaagtggatgtttaagaacaaagagtcaagaatgtttctgtccatgagaccactgttttgtttggataacagttgaaatatactagaccttgtcctaagcttgtttctacctttccgattagggaatctttaaatttattatgcctaatatctctaaggcacatcaaaactgctgcatctatgcccatatcaattaagggcttgatggctacttgaacacaatcgatgtgtaaatgtttgtacttacggctatattcataaattgatttgtttgaaagtaaatggaattcttcccctatatcttgtcctagaggaatattaatttctactgttctgattatataatcaaagttatgtttttctttaattgtttcaggaacatacagtgtatcctgagagatttctggaatgttccagtcatccatgttttgatttatatctttgaattagacttcctcatcgaagagattgtgttttggggcgacctcgtgggtcttgttttcatgctcattaagcaaattgctgtttttgggtgagttcattgaagaagaggatgaagatgagttggatttaaataaaatgcgagaaaaggaacgtaaaaggtgagacatgataaattcatcctccaatatctttgtcatcatatggttccatagaaatatttctgtaagcatatatgtaactaaatttcctggatctgaaaaatttaagaaaccctcttttttttttttttaaacatgcaatatagtttgaacgatacttccataaccaccagtatattatgtcttaacattttatttgaacaatacaccttagtcttcctgcccttcatcatccacgggtcttactgctacagtattattcaactaaaatatcagactgttgtgcttccaaaaaatactgttcaaacatatactgtttaaattaaaattactgtacacaggttcaaatc

SEQ ID NO: 15787 - DNA, 1088 bp, Glycine max
  Gm_smallRNAprecursor_8620
ttgtgaatcaaaataagtcttaagctctctttagttgtgttataaaagacaattgagcataaacaaacacaaattgtaactatccaagccttaagcaacataaatactactcttgatttctaggttgaaatcgctggtgctggcagcttgaacatacaaacttgtaaaaattattgggaattggtcactacgaattttgagctgaaatttttactgaagtttctagacatctagagcaaaattagaaaaaaaaaagaaacaagtgatttggataaatgaaaaaaataagaaaaatcatacacgttggtaggaaaatcattgtccagaaaaaaaaaagtgaaaggaaagtgtgcttgttgtttggctcaaaatttgttctataattggtgcctataattggttctctataccagtgtcaaaaccattccgctcgaaaaccagccttcaaagaaagtcaaagactggcctcgactttggatcttagcaccctaaaagtctgtctgtacaaacgatctaggcctgtattcggagtttccctggggttggtaaggcgaaatggggccaccctagcccattgagtgctctacctcgggccatcgacatcatacgctctactgaaatagatttcgcggaaaaccagctatatccgatcttggttggcctttcacccctagccacaagtcatccccgtattttgccacatacgtgggttcggtcctccaaggcctgttagagctctcttcaacctgctcatggctagatcgatcggtttcgggtcaaataggaagaactagaagattccacctctgaaaggcgcctacacctaatggcttaagccgctgttcccattttctcgctgacccatcatgcaaaaggtacgccgttagagtgagtgcgctttactaaatatcaagtaaaggctctaagctccttcgactgattgttcgcatcggatctcaggttctctattgcactccctaaatagggttcttttcacctttccctcacggtacttgtacgctatcggtcattgaggaatacttaggcttagagggtggtccccctttctcgcgtaaaagcgatcagaa

SEQ ID NO: 15788 - DNA, 1113 bp, Glycine max
  Gm_smallRNAprecursor_8621
ttctttttccgtaacgttacgaaactttacgaattttgtaacgatacttatgttccttccgcaaggttacgaatcttcacggattatgtatttactcttttttagctttcgaagaagttacgaaaactcacggattgcgaaaaacacatcctttcgatttccgtcacattacggaattttcacggatcgcgtaagcctgcttccttttgattttcggcacgtctcgggacttcacatattgtgcaacaaagggtgcaaagtatctcgaagcggccaatcaaaggttgtatatcatcaaataataatccccggacgaaattagggtatgacagtaaggtagtcaggtaatgagtttgaggtgcccttgatgtattctatgtcaaaatcaaagacacttagaattgcttgccatcttgcaaaaatttgttttgaggaaaggtttttaacatctttttgtaaaatatctttggctgatttacaatcaaccctgattagaaatttttggtttaataaatccgattgaaatttggaaaagcacaaaacaattgctaaaacttcttttttaacagttgaatattttaattgtgcaggattccaatgttttgatgtatatgcaatgacatgatcttggccatggactctttgtttgaggatgccaccataacctatgtctgaagcatcagtttcgacaattttaaatgcctgtgcaataggaagatatagacatttaatggattggactttgactttgatttctttaaccgtttgtgtatggaggtcagaccaaggaggcagatttttcttcagcctatcatgcaatggcttgacaatattgtttaaataggggacaaattctcctacgtaatttagacaacctagaaatctttgtaactgggttttgtctaagatttggttggggaatttgctagcaaactctattgacctttcgattggaatgattgtaccttgatatatattgtgaccaaggaatcgaattcgagtttggaaaagattgatttttgatttggagactgccaaaccattttgtttgatgatatgtatgaaggtttggagatgtttgaaatgttggtcaatgttttgggaaaagattaa

SEQ ID NO: 15789 - DNA, 1113 bp, Glycine max; identical to SEQ ID NO: 15788
  Gm_smallRNAprecursor_8622

SEQ ID NO: 15790 - DNA, 1114 bp, Glycine max
  Gm_smallRNAprecursor_8623
ttctttttccgtaacgttacgaaactttacgaattttgtaacgatacttatgttccttccgcaaggttacgaatcttcacggattatgtatttactcttttttagctttcgaagaagttacgaaaactcacggattgcgaaaaacacatcctttcgatttccgtcacattacggaattttcacggatcgcgtaagcctgcttccttttgattttcggcacgtctcgggacttcacatattgtgcaacaaagggtgcaaagtatctcgaagcggccaatcaaaggttgtatatcatcaaataataatccccggacgaaattagggtatgacagtaaggtagtcaggtaatgagtttgaggtgcccttgatgtattctatgtcaaaatcaaagacacttagaattgcttgccatcttgcaaaaatttgttttgaggaaaggtttttaacatctttttgtaaaatatctttggctgatttacaatcaaccctgattagaaatttttggtttaataaatccgattgaaatttggaaaagcacaaaacaattgctaaaacttcttttttaacagttgaatattttaattgtgcaggattccaatgttttgatgtatatgcaatgacatgatcttggccatggactctttgtttgaggatgccaccataacctatgtctgaagcatcagtttcgacaattttaaatgcctgtgcaataggaagatatagacatttaatggattggactttgactttgatttctttaaccgtttgtgtatggaggtcagaccaaggaggcagatttttcttcagcctatcatgcaatggcttgacaatattgtttaaataggggacaaattctcctacgtaatttagacaacctagaaatctttgtaactgggttttgtctaagatttggttggggaatttgctagcaaactctattgacctttcgattggaatgattgtaccttgatatatattgtgaccaaggaatcgaattcgagtttggaaaagattgatttttgatttggagactgccaaaccattttgtttgatgatatgtatgaaggtttggagatgtttgaaatgttggtcaatgttttgggaaaagattaaa

SEQ ID NO: 15791 - DNA, 1035 bp, Glycine max
  Gm_smallRNAprecursor_8624
acggattatgtatttactcttttttagctttcgaagaagttacgaaaactcacggattgcgaaaaacacatcctttcgatttccgtcacattacggaattttcacggatcgcgtaagcctgcttccttttgattttcggcacgtctcgggacttcacatattgtgcaacaaagggtgcaaagtatctcgaagcggccaatcaaaggttgtatatcatcaaataataatccccggacgaaattagggtatgacagtaaggtagtcaggtaatgagtttgaggtgcccttgatgtattctatgtcaaaatcaaagacacttagaattgcttgccatcttgcaaaaatttgttttgaggaaaggtttttaacatctttttgtaaaatatctttggctgatttacaatcaaccctgattagaaatttttggtttaataaatccgattgaaatttggaaaagcacaaaacaattgctaaaacttcttttttaacagttgaatattttaattgtgcaggattccaatgttttgatgtatatgcaatgacatgatcttggccatggactctttgtttgaggatgccaccataacctatgtctgaagcatcagtttcgacaattttaaatgcctgtgcaataggaagatatagacatttaatggattggactttgactttgatttctttaaccgtttgtgtatggaggtcagaccaaggaggcagatttttcttcagcctatcatgcaatggcttgacaatattgtttaaataggggacaaattctcctacgtaatttagacaacctagaaatctttgtaactgggttttgtctaagatttggttggggaatttgctagcaaactctattgacctttcgattggaatgattgtaccttgatatatattgtgaccaaggaatcgaattcgagtttggaaaagattgatttttgatttggagactgccaaaccattttgtttgatgatatgtatgaaggtttggagatgtttgaaatgttggtcaatgttttgggaaaagattaa

SEQ ID NO: 15792 - DNA, 1153 bp, Glycine max
  Gm_smallRNAprecursor_8625
aataataatccccggacgaaattagggtatgacagtaaggtagtcaggtaatgagtttgaggtgcccttgatgtattctatgtcaaaatcaaagacacttagaattgcttgccatcttgcaaaaatttgttttgaggaaaggtttttaacatctttttgtaaaatatctttggctgatttacaatcaaccctgattagaaatttttggtttaataaatccgattgaaatttggaaaagcacaaaacaattgctaaaacttcttttttaacagttgaatattttaattgtgcaggattccaatgttttgatgtatatgcaatgacatgatcttggccatggactctttgtttgaggatgccaccataacctatgtctgaagcatcagtttcgacaattttaaatgcctgtgcaataggaagatatagacatttaatggattggactttgactttgatttctttaaccgtttgtgtatggaggtcagaccaaggaggcagatttttcttcagcctatcatgcaatggcttgacaatattgtttaaataggggacaaattctcctacgtaatttagacaacctagaaatctttgtaactgggttttgtctaagatttggttggggaatttgctagcaaactctattgacctttcgattggaatgattgtaccttgatatatattgtgaccaaggaatcgaattcgagtttggaaaagattgatttttgatttggagactgccaaaccattttgtttgatgatatgtatgaaggtttggagatgtttgaaatgttggtcaatgttttgggaaaagattaaaacatcatctatgtagacaatgacaaattttgaatagggattaaaaatatcgttcataattttttgaaattctgaaggggcattcttcagtccgaatggcatcacgttccattcgtattgctcgaaaggtacagtaaacgctgttttgtacctatctgattcttggatttggatttgccaaaatccagatttcatatcaaattttgaaaatatctttgcagaatttaatctgttaagcaaatcttttttgtttggaataggatatctaatccactgtaatgcttgatttagtggtttgtaatttatgactaagcggggtgttccacgctcaatctca

SEQ ID NO: 15793 - DNA, 1168 bp, Glycine max
  Gm_smallRNAprecursor_8626
aataataatccccggacgaaattagggtatgacagtaaggtagtcaggtaatgagtttgaggtgcccttgatgtattctatgtcaaaatcaaagacacttagaattgcttgccatcttgcaaaaatttgttttgaggaaaggtttttaacatctttttgtaaaatatctttggctgatttacaatcaaccctgattagaaatttttggtttaataaatccgattgaaatttggaaaagcacaaaacaattgctaaaacttcttttttaacagttgaatattttaattgtgcaggattccaatgttttgatgtatatgcaatgacatgatcttggccatggactctttgtttgaggatgccaccataacctatgtctgaagcatcagtttcgacaattttaaatgcctgtgcaataggaagatatagacatttaatggattggactttgactttgatttctttaaccgtttgtgtatggaggtcagaccaaggaggcagatttttcttcagcctatcatgcaatggcttgacaatattgtttaaataggggacaaattctcctacgtaatttagacaacctagaaatctttgtaactgggttttgtctaagatttggttggggaatttgctagcaaactctattgacctttcgattggaatgattgtaccttgatatatattgtgaccaaggaatcgaattcgagtttggaaaagattgatttttgatttggagactgccaaaccattttgtttgatgatatgtatgaaggtttggagatgtttgaaatgttggtcaatgttttgggaaaagattaaaacatcatctatgtagacaatgacaaattttgaatagggattaaaaatatcgttcataattttttgaaattctgaaggggcattcttcagtccgaatggcatcacgttccattcgtattgctcgaaaggtacagtaaacgctgttttgtacctatctgattcttggatttggatttgccaaaatccagatttcatatcaaattttgaaaatatctttgcagaatttaatctgttaagcaaatcttttttgtttggaataggatatctaatccactgtaatgcttgatttagtggtttgtaatttatgactaagcggggtgttccacgctcaatctcagattgtttattgaca

SEQ ID NO: 15794 - DNA, 1031 bp, Glycine max
  Gm_smallRNAprecursor_8627
ctttttgtaaaatatctttggctgatttacaatcaaccctgattagaaatttttggtttaataaatccgattgaaatttggaaaagcacaaaacaattgctaaaacttcttttttaacagttgaatattttaattgtgcaggattccaatgttttgatgtatatgcaatgacatgatcttggccatggactctttgtttgaggatgccaccataacctatgtctgaagcatcagtttcgacaattttaaatgcctgtgcaataggaagatatagacatttaatggattggactttgactttgatttctttaaccgtttgtgtatggaggtcagaccaaggaggcagatttttcttcagcctatcatgcaatggcttgacaatattgtttaaataggggacaaattctcctacgtaatttagacaacctagaaatctttgtaactgggttttgtctaagatttggttggggaatttgctagcaaactctattgacctttcgattggaatgattgtaccttgatatatattgtgaccaaggaatcgaattcgagtttggaaaagattgatttttgatttggagactgccaaaccattttgtttgatgatatgtatgaaggtttggagatgtttgaaatgttggtcaatgttttgggaaaagattaaaacatcatctatgtagacaatgacaaattttgaatagggattaaaaatatcgttcataattttttgaaattctgaaggggcattcttcagtccgaatggcatcacgttccattcgtattgctcgaaaggtacagtaaacgctgttttgtacctatctgattcttggatttggatttgccaaaatccagatttcatatcaaattttgaaaatatctttgcagaatttaatctgttaagcaaatcttttttgtttggaataggatatctaatccactgtaatgcttgatttagtggtttgtaatttatgactaagcggggtgttccacgctcaatctcagattgtttattgacataaaaagccgcacaa

SEQ ID NO: 15795 - DNA, 1127 bp, Glycine max
  Gm_smallRNAprecursor_8628
ggacaaattctcctacgtaatttagacaacctagaaatctttgtaactgggttttgtctaagatttggttggggaatttgctagcaaactctattgacctttcgattggaatgattgtaccttgatatatattgtgaccaaggaatcgaattcgagtttggaaaagattgatttttgatttggagactgccaaaccattttgtttgatgatatgtatgaaggtttggagatgtttgaaatgttggtcaatgttttgggaaaagattaaaacatcatctatgtagacaatgacaaattttgaatagggattaaaaatatcgttcataattttttgaaattctgaaggggcattcttcagtccgaatggcatcacgttccattcgtattgctcgaaaggtacagtaaacgctgttttgtacctatctgattcttggatttggatttgccaaaatccagatttcatatcaaattttgaaaatatctttgcagaatttaatctgttaagcaaatcttttttgtttggaataggatatctaatccactgtaatgcttgatttagtggtttgtaatttatgactaagcggggtgttccacgctcaatctcagattgtttattgacataaaaagccgcacaagaccatgggcttttgcttttccggattaggcctttatcaagcaaatccttgatttccttttgacagtattgaagaagttcttcattcatttggattggtctggcttttgtgggaatttgtttttccctaaagtctttctcataagggagatcaacaatatgtttctttctgtcccaaaatgcatgtggcaattcagaacagacggtcgattcaatatgatttaataaagattgaattttttcttttacttggggttttcccagttgtatctgaatattattaaaagatacttcttcttttaagaaattaatttgattaatcttattttctataagatttatatttctggaaattggtttagtagaaaaattaaatataatttttcttcctaaataatttgtggttattccttcattagatatttggatgggaaacagggctctaatgaagggcgttcctaagattacttcattcttaaggttttttaccaga

SEQ ID NO: 15796 - DNA, 1080 bp, Glycine max
  Gm_smallRNAprecursor_8629
atgatttagttttagaaacaatggccctatttgacacaggggctgattcaaactgcattttagaaggattaattcctacaaaattctttaagaaaacctcagaaaaattaagtaccgcaaacggctcaaaattaaaaattaattttaagctatcaaatgcaatcattgaaaaccaaggtcttaagattatcacaaactttcttctggtaaaaaaccttaagaatgaagtaatcttaggaacgcccttcattagagccttgtttcccatccaaatatctaatgaaggaataaccacaaattatttaggaagaaaaattatatttaatttttctactaaaccaatttccagaaatataaatcttataaaaaataagattaatcaaattaacttcttaaaagaagaagtatcttttaataatattcagatacaactgggaaaaccccaagtaaaagaaaaaattcaatctttattaaattatattgaatcgaccgtctgttctgaattgccacatgcattttgggacagaaagaaacatattgtcgatctcccttatgagaaagactttagggaaaaacaaattcccacaaaagccagaccaatccaaatgaatgaagaacttcttcaatactatcaaaaggaaatcaaggatttgcttgataaaggcctaatccggaaaaacaaaagcccatggtcttgtgcggctttttatgtcaacaaacaatctgaaattgagcatggaacaccccgcttagtcataaattacaaaccactaaatcaagcattacaatgaattagatatcctattccaaacaaaaaatatttgcttaacagattaaattctgcaaagatattttcaaaatttgatatgaaatctggattttggcaaatccaaatccaagaatcagataggtacaaaacaacatttactgtacctttcgggcaatatgaatggaatgtgatgtcattcggattgaagaatgcccctttagaatttcaaaaaattatgaatgatatttttaatccctattcaaaatttgtcattgtctacatagatgatgttttaatcttttcccaaaaca

SEQ ID NO: 15797 - DNA, 1198 bp, Glycine max
  Gm_smallRNAprecursor_8630
acagaaagaaacatattgtcgatctcccttatgagaaagactttagggaaaaacaaattcccacaaaagccagaccaatccaaatgaatgaagaacttcttcaatactatcaaaaggaaatcaaggatttgcttgataaaggcctaatccggaaaaacaaaagcccatggtcttgtgcggctttttatgtcaacaaacaatctgaaattgagcatggaacaccccgcttagtcataaattacaaaccactaaatcaagcattacaatgaattagatatcctattccaaacaaaaaatatttgcttaacagattaaattctgcaaagatattttcaaaatttgatatgaaatctggattttggcaaatccaaatccaagaatcagataggtacaaaacaacatttactgtacctttcgggcaatatgaatggaatgtgatgtcattcggattgaagaatgcccctttagaatttcaaaaaattatgaatgatatttttaatccctattcaaaatttgtcattgtctacatagatgatgttttaatcttttcccaaaacattgaccaacatttcaaacatctccagaccttcatccatatcatcaaacagaatggtttggcaatctcccaatcaaaaatcaatcttttccaaactcgaattcgattccttggtcacaatatatatcaaggtacaatcattccaatcgaaaggtcaatagagtttgctagcaaatttcccaaccaaatcttagacaaaacccagttacaaagatttctaggttgtctaaattacataggagaatttgtcccctatttaaacaatattgtcaagccattgcatgataggctgaagaaaaatccgcctccatggtctgacctccatacacaaacagttaaagaaatcaaagtcaaagtccaatccattaaatgtctgtatcttcccattccacaggcatttaaaattatcgaaactaatggttcagacataggttatggtggcatcctcaaacaaagagttcatggccaagaccatgtcattgcatatacatcaaaacattggaatcctgcacaattaaaatattcaactgttaaaaaagaagttttagcaattgttttgtgcatttccaaatttcaatcggatttattaaaccaaaaaattttaatcagggttgattgtaaatcagccaaagatattttaca

SEQ ID NO: 15798 - DNA, 1232 bp, Glycine max
  Gm_smallRNAprecursor_8631
acagaaagaaacatattgtcgatctcccttatgagaaagactttagggaaaaacaaattcccacaaaagccagaccaatccaaatgaatgaagaacttcttcaatactatcaaaaggaaatcaaggatttgcttgataaaggcctaatccggaaaaacaaaagcccatggtcttgtgcggctttttatgtcaacaaacaatctgaaattgagcatggaacaccccgcttagtcataaattacaaaccactaaatcaagcattacaatgaattagatatcctattccaaacaaaaaatatttgcttaacagattaaattctgcaaagatattttcaaaatttgatatgaaatctggattttggcaaatccaaatccaagaatcagataggtacaaaacaacatttactgtacctttcgggcaatatgaatggaatgtgatgtcattcggattgaagaatgcccctttagaatttcaaaaaattatgaatgatatttttaatccctattcaaaatttgtcattgtctacatagatgatgttttaatcttttcccaaaacattgaccaacatttcaaacatctccagaccttcatccatatcatcaaacagaatggtttggcaatctcccaatcaaaaatcaatcttttccaaactcgaattcgattccttggtcacaatatatatcaaggtacaatcattccaatcgaaaggtcaatagagtttgctagcaaatttcccaaccaaatcttagacaaaacccagttacaaagatttctaggttgtctaaattacataggagaatttgtcccctatttaaacaatattgtcaagccattgcatgataggctgaagaaaaatccgcctccatggtctgacctccatacacaaacagttaaagaaatcaaagtcaaagtccaatccattaaatgtctgtatcttcccattccacaggcatttaaaattatcgaaactaatggttcagacataggttatggtggcatcctcaaacaaagagttcatggccaagaccatgtcattgcatatacatcaaaacattggaatcctgcacaattaaaatattcaactgttaaaaaagaagttttagcaattgttttgtgcatttccaaatttcaatcggatttattaaaccaaaaaattttaatcagggttgattgtaaatcagccaaagatattttacaaaaagatgttaaaaaccttgcctcaaaacaaatt

SEQ ID NO: 15799 - DNA, 1107 bp, Glycine max
  Gm_smallRNAprecursor_8632
caatctgaaattgagcatggaacaccccgcttagtcataaattacaaaccactaaatcaagcattacaatgaattagatatcctattccaaacaaaaaatatttgcttaacagattaaattctgcaaagatattttcaaaatttgatatgaaatctggattttggcaaatccaaatccaagaatcagataggtacaaaacaacatttactgtacctttcgggcaatatgaatggaatgtgatgtcattcggattgaagaatgcccctttagaatttcaaaaaattatgaatgatatttttaatccctattcaaaatttgtcattgtctacatagatgatgttttaatcttttcccaaaacattgaccaacatttcaaacatctccagaccttcatccatatcatcaaacagaatggtttggcaatctcccaatcaaaaatcaatcttttccaaactcgaattcgattccttggtcacaatatatatcaaggtacaatcattccaatcgaaaggtcaatagagtttgctagcaaatttcccaaccaaatcttagacaaaacccagttacaaagatttctaggttgtctaaattacataggagaatttgtcccctatttaaacaatattgtcaagccattgcatgataggctgaagaaaaatccgcctccatggtctgacctccatacacaaacagttaaagaaatcaaagtcaaagtccaatccattaaatgtctgtatcttcccattccacaggcatttaaaattatcgaaactaatggttcagacataggttatggtggcatcctcaaacaaagagttcatggccaagaccatgtcattgcatatacatcaaaacattggaatcctgcacaattaaaatattcaactgttaaaaaagaagttttagcaattgttttgtgcatttccaaatttcaatcggatttattaaaccaaaaaattttaatcagggttgattgtaaatcagccaaagatattttacaaaaagatgttaaaaaccttgcctcaaaacaaatttttgcaagatggcaagcaattctaagtgtctttgattttgacatagaatacatcaagggcacctcaaactca

SEQ ID NO: 15800 - DNA, 1179 bp, Glycine max
  Gm_smallRNAprecursor_8633
gtcataaattacaaaccactaaatcaagcattacaatgaattagatatcctattccaaacaaaaaatatttgcttaacagattaaattctgcaaagatattttcaaaatttgatatgaaatctggattttggcaaatccaaatccaagaatcagataggtacaaaacaacatttactgtacctttcgggcaatatgaatggaatgtgatgtcattcggattgaagaatgcccctttagaatttcaaaaaattatgaatgatatttttaatccctattcaaaatttgtcattgtctacatagatgatgttttaatcttttcccaaaacattgaccaacatttcaaacatctccagaccttcatccatatcatcaaacagaatggtttggcaatctcccaatcaaaaatcaatcttttccaaactcgaattcgattccttggtcacaatatatatcaaggtacaatcattccaatcgaaaggtcaatagagtttgctagcaaatttcccaaccaaatcttagacaaaacccagttacaaagatttctaggttgtctaaattacataggagaatttgtcccctatttaaacaatattgtcaagccattgcatgataggctgaagaaaaatccgcctccatggtctgacctccatacacaaacagttaaagaaatcaaagtcaaagtccaatccattaaatgtctgtatcttcccattccacaggcatttaaaattatcgaaactaatggttcagacataggttatggtggcatcctcaaacaaagagttcatggccaagaccatgtcattgcatatacatcaaaacattggaatcctgcacaattaaaatattcaactgttaaaaaagaagttttagcaattgttttgtgcatttccaaatttcaatcggatttattaaaccaaaaaattttaatcagggttgattgtaaatcagccaaagatattttacaaaaagatgttaaaaaccttgcctcaaaacaaatttttgcaagatggcaagcaattctaagtgtctttgattttgacatagaatacatcaagggcacctcaaactcattacctgactaccttacccgtgaattcttacagaaaagtggtaatgcctcctaaggcatcgggaatctccctaaaggaaggaaggagtacaggcaaaggagccag

SEQ ID NO: 15801 - DNA, 1181 bp, Glycine max
  Gm_smallRNAprecursor_8634
gtcataaattacaaaccactaaatcaagcattacaatgaattagatatcctattccaaacaaaaaatatttgcttaacagattaaattctgcaaagatattttcaaaatttgatatgaaatctggattttggcaaatccaaatccaagaatcagataggtacaaaacaacatttactgtacctttcgggcaatatgaatggaatgtgatgtcattcggattgaagaatgcccctttagaatttcaaaaaattatgaatgatatttttaatccctattcaaaatttgtcattgtctacatagatgatgttttaatcttttcccaaaacattgaccaacatttcaaacatctccagaccttcatccatatcatcaaacagaatggtttggcaatctcccaatcaaaaatcaatcttttccaaactcgaattcgattccttggtcacaatatatatcaaggtacaatcattccaatcgaaaggtcaatagagtttgctagcaaatttcccaaccaaatcttagacaaaacccagttacaaagatttctaggttgtctaaattacataggagaatttgtcccctatttaaacaatattgtcaagccattgcatgataggctgaagaaaaatccgcctccatggtctgacctccatacacaaacagttaaagaaatcaaagtcaaagtccaatccattaaatgtctgtatcttcccattccacaggcatttaaaattatcgaaactaatggttcagacataggttatggtggcatcctcaaacaaagagttcatggccaagaccatgtcattgcatatacatcaaaacattggaatcctgcacaattaaaatattcaactgttaaaaaagaagttttagcaattgttttgtgcatttccaaatttcaatcggatttattaaaccaaaaaattttaatcagggttgattgtaaatcagccaaagatattttacaaaaagatgttaaaaaccttgcctcaaaacaaatttttgcaagatggcaagcaattctaagtgtctttgattttgacatagaatacatcaagggcacctcaaactcattacctgactaccttacccgtgaattcttacagaaaagtggtaatgcctcctaaggcatcgggaatctccctaaaggaaggaaggagtacaggcaaaggagccagac

SEQ ID NO: 15802 - DNA, 1073 bp, Glycine max
  Gm_smallRNAprecursor_8635
tgtacctttcgggcaatatgaatggaatgtgatgtcattcggattgaagaatgcccctttagaatttcaaaaaattatgaatgatatttttaatccctattcaaaatttgtcattgtctacatagatgatgttttaatcttttcccaaaacattgaccaacatttcaaacatctccagaccttcatccatatcatcaaacagaatggtttggcaatctcccaatcaaaaatcaatcttttccaaactcgaattcgattccttggtcacaatatatatcaaggtacaatcattccaatcgaaaggtcaatagagtttgctagcaaatttcccaaccaaatcttagacaaaacccagttacaaagatttctaggttgtctaaattacataggagaatttgtcccctatttaaacaatattgtcaagccattgcatgataggctgaagaaaaatccgcctccatggtctgacctccatacacaaacagttaaagaaatcaaagtcaaagtccaatccattaaatgtctgtatcttcccattccacaggcatttaaaattatcgaaactaatggttcagacataggttatggtggcatcctcaaacaaagagttcatggccaagaccatgtcattgcatatacatcaaaacattggaatcctgcacaattaaaatattcaactgttaaaaaagaagttttagcaattgttttgtgcatttccaaatttcaatcggatttattaaaccaaaaaattttaatcagggttgattgtaaatcagccaaagatattttacaaaaagatgttaaaaaccttgcctcaaaacaaatttttgcaagatggcaagcaattctaagtgtctttgattttgacatagaatacatcaagggcacctcaaactcattacctgactaccttacccgtgaattcttacagaaaagtggtaatgcctcctaaggcatcgggaatctccctaaaggaaggaaggagtacaggcaaaggagccagactggcagatatatatatatatatatatatatatatatatatatatatcacatcccattagttaaaacgt

SEQ ID NO: 15803 - DNA, 1071 bp, Glycine max
  Gm_smallRNAprecursor_8636
tacctttcgggcaatatgaatggaatgtgatgtcattcggattgaagaatgcccctttagaatttcaaaaaattatgaatgatatttttaatccctattcaaaatttgtcattgtctacatagatgatgttttaatcttttcccaaaacattgaccaacatttcaaacatctccagaccttcatccatatcatcaaacagaatggtttggcaatctcccaatcaaaaatcaatcttttccaaactcgaattcgattccttggtcacaatatatatcaaggtacaatcattccaatcgaaaggtcaatagagtttgctagcaaatttcccaaccaaatcttagacaaaacccagttacaaagatttctaggttgtctaaattacataggagaatttgtcccctatttaaacaatattgtcaagccattgcatgataggctgaagaaaaatccgcctccatggtctgacctccatacacaaacagttaaagaaatcaaagtcaaagtccaatccattaaatgtctgtatcttcccattccacaggcatttaaaattatcgaaactaatggttcagacataggttatggtggcatcctcaaacaaagagttcatggccaagaccatgtcattgcatatacatcaaaacattggaatcctgcacaattaaaatattcaactgttaaaaaagaagttttagcaattgttttgtgcatttccaaatttcaatcggatttattaaaccaaaaaattttaatcagggttgattgtaaatcagccaaagatattttacaaaaagatgttaaaaaccttgcctcaaaacaaatttttgcaagatggcaagcaattctaagtgtctttgattttgacatagaatacatcaagggcacctcaaactcattacctgactaccttacccgtgaattcttacagaaaagtggtaatgcctcctaaggcatcgggaatctccctaaaggaaggaaggagtacaggcaaaggagccagactggcagatatatatatatatatatatatatatatatatatatatatcacatcccattagttaaaacgt

SEQ ID NO: 15804 - DNA, 1115 bp, Glycine max
  Gm_smallRNAprecursor_8637
tcaatagagtttgctagcaaatttcccaaccaaatcttagacaaaacccagttacaaagatttctaggttgtctaaattacataggagaatttgtcccctatttaaacaatattgtcaagccattgcatgataggctgaagaaaaatccgcctccatggtctgacctccatacacaaacagttaaagaaatcaaagtcaaagtccaatccattaaatgtctgtatcttcccattccacaggcatttaaaattatcgaaactaatggttcagacataggttatggtggcatcctcaaacaaagagttcatggccaagaccatgtcattgcatatacatcaaaacattggaatcctgcacaattaaaatattcaactgttaaaaaagaagttttagcaattgttttgtgcatttccaaatttcaatcggatttattaaaccaaaaaattttaatcagggttgattgtaaatcagccaaagatattttacaaaaagatgttaaaaaccttgcctcaaaacaaatttttgcaagatggcaagcaattctaagtgtctttgattttgacatagaatacatcaagggcacctcaaactcattacctgactaccttacccgtgaattcttacagaaaagtggtaatgcctcctaaggcatcgggaatctccctaaaggaaggaaggagtacaggcaaaggagccagactggcagatatatatatatatatatatatatatatatatatatatatcacatcccattagttaaaacgtaattttctttgaagaaaaatcagcatgctacacggacaggcagatatcctcatagctaggttcgctgaccctaactatggtgttaaaacggtaaattttataataaactccccttacctatcgtgagctactccgcggattcctcgtcgcgtcacttgaagattccttttcgtccttgctcgtcgattccatgaaagcctctactatgccaaaacgaaggagacttagtatggatttcagaaaacaaagctagtaacagtgctatgggtcaaacacctacatcactacatgaaagagctgagagcattttgggtttttcaaaggaacatcatttggaaattccgac

SEQ ID NO: 15805 - DNA, 1149 bp, Glycine max
  Gm_smallRNAprecursor_8638
gcaatttttgtaccgtgtggttggtacttgtaatgatcgtgaacctttgttcgtgggagcagaatgacagcagtaagtacgagaagtgagaatcttttgtggagccgacgtgatgacgttgggattattttgggagagagttgtgttttgttaatcaactcctccatagctggttacataattcattttttgaattgaggatgtaaatcacatatttaggtatatgtatgaacaaatttactttccattatgtgaataatgtataccgagttactatgcctatatatatatatatatatatatatatatatatatatatatatatatatatatgcattactcttacttcctatctgtccatttgtatctttttcgctgatctctggtatcagagcatgatggggaagtaggaatactgtccgtaaggacgtatgttaacaaattttatggatttgacaccttgtatagtatgagtcatattttattttaatttgtacagtagatgtttgaacagtacttcctggaagtacagtagtctaatattttagttgaatggtactgtagcagtaagacccgtggtagataaagggcagtaaggctaaggtgtactgtttaaccaaaatatcaagacataatatattggtggctataggattgccgttcaaactatttttcaaaactatttttcaaaaaaaaaaaagagttttcttaaaaataatttagatccgaaaaattttgttacatatttacttacggagatatttctatggaaccaaatgagggcgaagatattagaggattttataattatgtctagactcctacgttcttttttgtgtatttcctttcggtctaattcctcttcatcaaattcttccagaaattcaaacttattaaatgatcaagataaccagacccaagaggtcgcccctaaacacaatctcttcgatgaggaagtccgattcgaagatattaatcaaaacatggatgactggaacatcccagaaatctctcaggatcaactatacgttcctaaaacaattaaagataaacacaattttgactacataatcaaaacagtagaaaacaatattcctctagggcaagacataggggaagaattccatttactttcaaaaaattcaattt

SEQ ID NO: 15806 - DNA, 1149 bp, Glycine max; identical to SEQ ID NO: 15805
  Gm_smallRNAprecursor_8639

SEQ ID NO: 15807 - DNA, 1162 bp, Glycine max
  Gm_smallRNAprecursor_8640
ttattaatgattttgttctagaaacaatggccctattcgacacaggggctgactcaaactgtattttagaaggattaattcctacaaaattctttgagaagacctcggagaaacttagtacagcaaatggctcaaaattaaaaattaactttaagttatcaaatgcaattattgaaaatcaaggtcttaggattaacacaaactttcttctggtaaaaaaccttaagaacgaagtaatcctaggaactcccttcataagagctttatttcccatccaaatatctaatgaaggaataactacaagttatttaggaagaaaaattatatttaatttttctaccaaaccaatctccagaaatataaattttataaagaataagattaatcaaattaacttcttaaaagaagaagtatcgttcaataatatccaaatacaactaggaaaaccccaaataaaggagaaaatccaatctttattaagtcatatagaatcaacagtttgttctgaattgccacatgcattttgggacaaaaagaaacatattgttgatcttccttatgagaaagattttagggaaaaacaaattcccacaaaagctagaccaatccaaatgaatgaagaactccttcaatattgccaaaaagaaattaaagatttacttgataaaggtttaattcggaaaagtaaaagtccatggtcttgtgcagctttttacgtcaacaaacaatccgagattgagcaaggaacaccccgcttagtcataaattacaaaccgttaaatcaagcattacaatggatcaggtatcctattccaaacaaaaaagacctacttaacagattaaattctgcaaaggtattttcaaaatttgacatgaaatccggattctggcaaatccaaatccaagaatcagataggtacaaaacagtgtttactgtacctttcgggcaatatgagtggaatgtaatgccattcggactgaagaatgcccctttagaatttcaaaaaatcatgaatgatattttcaatccttattcaaaattcgtcattgtttacattgatgatgttttaatcttctcccaaaatattgatcaacattttaaacacctctagactttcatccatattatcaaacagaatggtttggtagtctccaaatcaaa

SEQ ID NO: 15808 - DNA, 1038 bp, Glycine max
  Gm_smallRNAprecursor_8641
tacctttcgggcaatatgagtggaatgtaatgccattcggactgaagaatgcccctttagaatttcaaaaaatcatgaatgatattttcaatccttattcaaaattcgtcattgtttacattgatgatgttttaatcttctcccaaaatattgatcaacattttaaacacctctagactttcatccatattatcaaacagaatggtttggtagtctccaaatcaaagataaatcttttccagacacggatacggttccttgggcacaatatataccaaggcacaatcattccgatagaaagatcaatagaatttgccagcaaattccctaaccaaatcttagacaagacccagttacaacgatttctggggtgcctaaattatgtaggagaatttgtcccctatctaaacaatattgtcaaaccattacatgataggctgaaaaagaatctgcctccttggtctgacctccatactcaaacagtcaaagaaatcaaagtcaaagtccaatccataaaatgtctgtatcttcccatttcacaggcattcaaaattgtcgaaactgatgcatcagacatcggttacggtggtatccttaaacagcaaatacacggtcaagaacatgtcattgcatatacttcaaaacattggaatcctgcacaattaaaatattcaactgttaaaaaggaagttttagcaatttttttgtgcatttccaaatttcaatctgatttattgaatcaaaaatttttagtaagggttgactgcaaatcagccaaagacattttacaaaaggatgtaaaaaaccttgcctcaaaacaaatttttgcaagatggcaggcaattttaagcgtctttgattttaacatagaatatatcaagggctcttcaaactctctacctgactacctcacccgtgaatttttatagaaaattcccgatgcctcctaaggtgtctagctcctccagcagaggaggaaaatccggtactaaaggaaaagatgttatattggctctaccagagccaataaacaagaag

SEQ ID NO: 15809 - DNA, 1105 bp, Glycine max
  Gm_smallRNAprecursor_8642
ggcaattttaagcgtctttgattttaacatagaatatatcaagggctcttcaaactctctacctgactacctcacccgtgaatttttatagaaaattcccgatgcctcctaaggtgtctagctcctccagcagaggaggaaaatccggtactaaaggaaaagatgttatattggctctaccagagccaataaacaagaaggcaactacatcatcttctgggtcacctactcagactgggtcatcaacccagaaaggaaagcttgaagggtcattgacccagataaaacctgagtcatcaactcaggaatccccaaaaccaacaacaacaaaacaggttgtggctgactatgcctggtcaatacaaactctcctgaccttagaagacataggcctcaccagagtaccaaaattggccaaaaagacctgggcagaaatggcctcagaatcagacgatgattctgaaacagacctacaaaaacaaatccaaaaggccaaacagaccaaaactgtctgtaaccaaaaaccaagccaaccgttggctcaacaagaatcaacaccacaacccaacaatagctatatttcaaaaaaaaaattcaatgttttacaaatggaaccagaatactgggacaaaaatcctttcaaggcaaccaccaaagtattccccccaggattccattataggccaacggccacaaataaaaccaaaaaattctacgaattcatcctaatagatacaaactcagtatctattaaacacttcaaagaccccaaagatccaaacctaaatacccattccacaatccaaatcctaaaggttatgcagccacgacattatggctcaaacttgaaccaacccaaaaaaatttctgcaccttttgatcctgtaggatataattattgggactacattgacgcctggaccaatgtgttctggcatcaaaatagtaaatttaagcattcatggctaatttacttcaagaataacaatgtgtataattttccaaattggttcctccaatggtggaactacttcgaaccaattccacagatatttccagaagaagtccaacagggattccaacaattcaccaagctcttcaatag

SEQ ID NO: 15810 - DNA, 1071 bp, Glycine max
  Gm_smallRNAprecursor_8643
ggccaaacagaccaaaactgtctgtaaccaaaaaccaagccaaccgttggctcaacaagaatcaacaccacaacccaacaatagctatatttcaaaaaaaaaattcaatgttttacaaatggaaccagaatactgggacaaaaatcctttcaaggcaaccaccaaagtattccccccaggattccattataggccaacggccacaaataaaaccaaaaaattctacgaattcatcctaatagatacaaactcagtatctattaaacacttcaaagaccccaaagatccaaacctaaatacccattccacaatccaaatcctaaaggttatgcagccacgacattatggctcaaacttgaaccaacccaaaaaaatttctgcaccttttgatcctgtaggatataattattgggactacattgacgcctggaccaatgtgttctggcatcaaaatagtaaatttaagcattcatggctaatttacttcaagaataacaatgtgtataattttccaaattggttcctccaatggtggaactacttcgaaccaattccacagatatttccagaagaagtccaacagggattccaacaattcaccaagctcttcaatagcaaggaatcaagaattccggcagatttaaagtatttttctagttttgccttgtcacagattttttcatggcaatacagatatggaaaaaccgaaaacagcaaacaatatccaccattgcagagacatgcctttgtaaagtggtggtcacaatttgatacctcaaaggctgctccagaacaagtcaagaactggtttcagagcaaccctgagtttctcaagcctgctgatccagagacatcattgtttctaaatcaaaagtctcaacttgcagcattcttagcaagctcaaaatctaaagaaagtcttgctcagaatcttaaggaagttctccagctacttcaacaggaaggagaagaagaaccccccaagaaggaagtcgaatcatccgagaataatgatgaccaagaagatgatccattctaccagaatgaggatgactgttttggtatatcgtt

SEQ ID NO: 15811 - DNA, 1157 bp, Glycine max
  Gm_smallRNAprecursor_8644
gatccaaacctaaatacccattccacaatccaaatcctaaaggttatgcagccacgacattatggctcaaacttgaaccaacccaaaaaaatttctgcaccttttgatcctgtaggatataattattgggactacattgacgcctggaccaatgtgttctggcatcaaaatagtaaatttaagcattcatggctaatttacttcaagaataacaatgtgtataattttccaaattggttcctccaatggtggaactacttcgaaccaattccacagatatttccagaagaagtccaacagggattccaacaattcaccaagctcttcaatagcaaggaatcaagaattccggcagatttaaagtatttttctagttttgccttgtcacagattttttcatggcaatacagatatggaaaaaccgaaaacagcaaacaatatccaccattgcagagacatgcctttgtaaagtggtggtcacaatttgatacctcaaaggctgctccagaacaagtcaagaactggtttcagagcaaccctgagtttctcaagcctgctgatccagagacatcattgtttctaaatcaaaagtctcaacttgcagcattcttagcaagctcaaaatctaaagaaagtcttgctcagaatcttaaggaagttctccagctacttcaacaggaaggagaagaagaaccccccaagaaggaagtcgaatcatccgagaataatgatgaccaagaagatgatccattctaccagaatgaggatgactgttttggtatatcgttagacgatgattagttgtagtaatcatgaattattgtaactaattattcggttcccgataataatgtaatttgaaaaagtttttgtaacagttccggtaaacattactgatactgttgaaacagtaaaacattgggtctatttaaaggagtcctcattccctttgtaaggcaccctttcagatagtctcaaaaccaggttttagagagagaagctctgcctagggaaaacctctttgtaagcttttctttcgatttcaataaattcaaagttctatttttcacatctcccttctcccttcactgatcctgtgcggctctgccgccgcttcagtttctttgttttaaaaaacctgagtttgtaagccggat

SEQ ID NO: 15812 - DNA, 1099 bp, Glycine max
  Gm_smallRNAprecursor_8645
ggcaatgcaaatagtgaaacctaaagaggaaattttccccaacaaacgcagaccagcccaagccccaagtacaaacccaaatgataaagagtgggctgttgctaggtgcacccaacattattgttggtgcacccaacattttttaaaaatggcaaaactgccctctgctgtcttcttcctttaaaagctattttttgggggcaaaaacgtttgtgcagtgcttcctcttcattttctctctttggtgcacagtgcttcgccgttttttcttcattttcttgcgattggttagcttcggtgaaggtgaaggagaaggtgtcggtgttcattcttgcggtggttggttcgtcggcggtgacattcgaggtacattgggtgtgtgtgagagggtggtccgtaaatcatacagatcaagttgatccgcacggttgatacaaatcaagttgatctgtatgttcatttgaagcatacagatcaagttgatccataaaccttgcgaatcaacttgatccgtaagccttttacggatcaagttgatccgtaaaagccttgcggatcaacttgatccgtaagcatttttacgaatcaagttgatccgtaaaagacttacggatcaagttgatccccaaggattttacgaatcaagttgattcgtaaaaggcttacggatcaacttgatccgtagaagccttgcggatcaacttgattcataagcttatacggattttgaaattttatcctttatttaagtttaaatttttttataattattactttgtttgtattgtcattttgcattttaattgtttatactctgtgttgaaatttatgatttattgttaagatggatgaagatcaatggatgtatgacagtataatgtctgaagaagttaatatggattatcaaaatgaagaagaatatggtgtgaatgaaccacatgttgattgttcgaatgtgttcaatacttctcaagtaataatgttcatgatagtgagtgatttaataaaatgaatgtgttatagaaaattgaaattgtctggattgctttgtaggtgtttgacagctgagatgatgtattgcggtgggctcgatccattg

SEQ ID NO: 15813 - DNA, 1099 bp, Glycine max; identical to SEQ ID NO: 15812
  Gm_smallRNAprecursor_8646

SEQ ID NO: 15814 - DNA, 1043 bp, Glycine max
  Gm_smallRNAprecursor_8647
actagatctgcgactaaattaaatggtgacagttttgtttactactactatcggcaatctcaatggcagtgcggtgcgaggtcgtgcagtgttaatctccactatgagtttgcaaatccacacatgtaaaatatcctaaccatccaatcttttattcataaatccaacggtatttatttatctaatatacccttccatatgatataacatattattatattttattttttatttatttaaaacaactggttaacataacctgctactacaagtaaaatgaacaggtccaccgctagatcacttaaaacttctccaccttagcccaaccaaccttagagccctagaattaataaatagaatttgtacatttatttgttaatttaaagacatcaaccatttatatatattgtcaaaattgtaaaattggtcccccactttatctctaattacggatttggtccccctataatttaattcataaatttggtcctccaattttataaatccctgcaaaattggtcctagaagcctgatttggacgttgaccgttaacctcagacgttgactgccacgtgtcaatgccacatgtcaacgtctgagtggttccccgtaaagacttcattcttttaggtaaaattgcacttttggtccatcaattttactccaatttctattttggtccccctatagtttaattcacacatttggtcccccagttttataaatccctttataaattgttcctgcaaaattgatcttttgaatggtttagcctctagtgctagagacatggtaagtcttgataaatctcgggcttctttttcatcgcaagtttttcactcacttggaacccagagaaaaatcactctttgtctctctcccacttccggggttgttcaacttgggaaagtggtgcatgaatcccaacctgggtctgaaatttttagatctcttattttaacaggttttgtaataactccctctttttttttctttttctgctctccaatgcgatattatgtgtatacgactgcttaagtggc

SEQ ID NO: 15815 - DNA, 1033 bp, Glycine max
  Gm_smallRNAprecursor_8648
tactactatcggcaatctcaatggcagtgcggtgcgaggtcgtgcagtgttaatctccactatgagtttgcaaatccacacatgtaaaatatcctaaccatccaatcttttattcataaatccaacggtatttatttatctaatatacccttccatatgatataacatattattatattttattttttatttatttaaaacaactggttaacataacctgctactacaagtaaaatgaacaggtccaccgctagatcacttaaaacttctccaccttagcccaaccaaccttagagccctagaattaataaatagaatttgtacatttatttgttaatttaaagacatcaaccatttatatatattgtcaaaattgtaaaattggtcccccactttatctctaattacggatttggtccccctataatttaattcataaatttggtcctccaattttataaatccctgcaaaattggtcctagaagcctgatttggacgttgaccgttaacctcagacgttgactgccacgtgtcaatgccacatgtcaacgtctgagtggttccccgtaaagacttcattcttttaggtaaaattgcacttttggtccatcaattttactccaatttctattttggtccccctatagtttaattcacacatttggtcccccagttttataaatccctttataaattgttcctgcaaaattgatcttttgaatggtttagcctctagtgctagagacatggtaagtcttgataaatctcgggcttctttttcatcgcaagtttttcactcacttggaacccagagaaaaatcactctttgtctctctcccacttccggggttgttcaacttgggaaagtggtgcatgaatcccaacctgggtctgaaatttttagatctcttattttaacaggttttgtaataactccctctttttttttctttttctgctctccaatgcgatattatgtgtatacgactgcttaagtggcctatgtatgacaatgatatttttgtttgaaat

SEQ ID NO: 15816 - DNA, 1149 bp, Glycine max
  Gm_smallRNAprecursor_8649
gcagattgaacagtaaaaaaaaaaaactcttgattcaaaagttagagacttgtattgttatggatagataagataaaactacctaatcacaatatatatatatatatatatatatatatatatatatatatatatatatatataccagagatcaacagaaaaggatcaaacgaacaaataggaagtaagaatgcagtatggtataaacacaaatcgaaatataaacttttaaaaataggtatcaagggcacaccgaagaccggcttacaaatcccaggttttcataaacaaagaaaccgaagcggcggcagagccgcacaggatcggtacaagagggagaggggagacggatgaaaaatagaaatttattaaaacttgaaagaagcgcttacaaaagttgttctttcagagcacctcctctcagaaaccttaaaaatggccaaatgaaagagtgcctcacaatatggttgaggactccttatatagccaaaattctttgactggtagttgccggtagttttgatcgaaactatttgactgttcgttacaggacaagtagttttgaccgggacttatttgctacaggacaggttgtattgtccaaattaattacatacagacggtcttgtaaccgtaattacagttaatctaaacaaataccaaaacaatcatctttgttttggtaaaaagggtcttcttcatctttttcagcagagcttgtttcttccttctttgaggatgaaccttcttcctcttgctgtaacatttgcagaacttctttaagatttttagttaggctctctttagattttgagtctgctaaaaatgctgccagatgggacttttggtttaagaacacagaagtttctggatcagctgctttgaggaattctggatgggatttgaaccagagtttcacttgttctggatctgctttggatgagtcgaattgagtccaccattttacaaatgcatgtctttgtagtgatggatattggtttgttttttcaatcttactgtaacgatattgccatgagaaaatccatgacagagcaaaactggaaaaatatttaagatctgctggaattcgtgattcctgagaattgtattgtttgtcaaattgagaaaatccttgttggattgtttcta

SEQ ID NO: 15817 - DNA, 1079 bp, Glycine max
  Gm_smallRNAprecursor_8650
ttgaaagaagcgcttacaaaagttgttctttcagagcacctcctctcagaaaccttaaaaatggccaaatgaaagagtgcctcacaatatggttgaggactccttatatagccaaaattctttgactggtagttgccggtagttttgatcgaaactatttgactgttcgttacaggacaagtagttttgaccgggacttatttgctacaggacaggttgtattgtccaaattaattacatacagacggtcttgtaaccgtaattacagttaatctaaacaaataccaaaacaatcatctttgttttggtaaaaagggtcttcttcatctttttcagcagagcttgtttcttccttctttgaggatgaaccttcttcctcttgctgtaacatttgcagaacttctttaagatttttagttaggctctctttagattttgagtctgctaaaaatgctgccagatgggacttttggtttaagaacacagaagtttctggatcagctgctttgaggaattctggatgggatttgaaccagagtttcacttgttctggatctgctttggatgagtcgaattgagtccaccattttacaaatgcatgtctttgtagtgatggatattggtttgttttttcaatcttactgtaacgatattgccatgagaaaatccatgacagagcaaaactggaaaaatatttaagatctgctggaattcgtgattcctgagaattgtattgtttgtcaaattgagaaaatccttgttggattgtttctaggaatatctctggaattggaccaaagaaatcccaccattgtaaaaaccaatttggaaaattataaattgtgttggttttgaaatatatcagccatgaattcttgaagcgggtattttggtgccaaaaaaccttagtccaagcatcaatatagtcccaataggtataacctactgagtcaaatggtattgaaaatctctttcctttgtttaagtccgaaccaaaatgtcttggttgaagaacttttagtatttggattcttgagtgggtgttcaatgattggtcttttgggtctttgaaatgtttg

SEQ ID NO: 15818 - DNA, 1107 bp, Glycine max
  Gm_smallRNAprecursor_8651
gcagaacttctttaagatttttagttaggctctctttagattttgagtctgctaaaaatgctgccagatgggacttttggtttaagaacacagaagtttctggatcagctgctttgaggaattctggatgggatttgaaccagagtttcacttgttctggatctgctttggatgagtcgaattgagtccaccattttacaaatgcatgtctttgtagtgatggatattggtttgttttttcaatcttactgtaacgatattgccatgagaaaatccatgacagagcaaaactggaaaaatatttaagatctgctggaattcgtgattcctgagaattgtattgtttgtcaaattgagaaaatccttgttggattgtttctaggaatatctctggaattggaccaaagaaatcccaccattgtaaaaaccaatttggaaaattataaattgtgttggttttgaaatatatcagccatgaattcttgaagcgggtattttggtgccaaaaaaccttagtccaagcatcaatatagtcccaataggtataacctactgagtcaaatggtattgaaaatctctttcctttgtttaagtccgaaccaaaatgtcttggttgaagaacttttagtatttggattcttgagtgggtgttcaatgattggtcttttgggtctttgaaatgtttgatagaaattgaatttgagtctaccaaaatcaattcataaaaagtccttgacttcaggatggtagttggtttgtagtgaaatcctgacgggaaagccttggccgtcgccttgaagggttttttgtcccaaaattcaggttccatctgcaaaatagttgaaaatttatttttataaatataattgttagtttttttggtaggtggtgtttgtactttggctagggctagtttccctttagcattggtagctattttggtcattgatgcattttggatcattgtttgtaaattcgattcaaaatcatcgtcagattttgaggcaatatctgcccaagattttttgattattttttggaaatttggttagacccatgtcttgaggggcatgaagggtttcaattggccaagcatagtcagccgat

SEQ ID NO: 15819 - DNA, 1107 bp, Glycine max; identical to SEQ ID NO: 15818
  Gm_smallRNAprecursor_8652

SEQ ID NO: 15820 - DNA, 1108 bp, Glycine max
  Gm_smallRNAprecursor_8653
gcagaacttctttaagatttttagttaggctctctttagattttgagtctgctaaaaatgctgccagatgggacttttggtttaagaacacagaagtttctggatcagctgctttgaggaattctggatgggatttgaaccagagtttcacttgttctggatctgctttggatgagtcgaattgagtccaccattttacaaatgcatgtctttgtagtgatggatattggtttgttttttcaatcttactgtaacgatattgccatgagaaaatccatgacagagcaaaactggaaaaatatttaagatctgctggaattcgtgattcctgagaattgtattgtttgtcaaattgagaaaatccttgttggattgtttctaggaatatctctggaattggaccaaagaaatcccaccattgtaaaaaccaatttggaaaattataaattgtgttggttttgaaatatatcagccatgaattcttgaagcgggtattttggtgccaaaaaaccttagtccaagcatcaatatagtcccaataggtataacctactgagtcaaatggtattgaaaatctctttcctttgtttaagtccgaaccaaaatgtcttggttgaagaacttttagtatttggattcttgagtgggtgttcaatgattggtcttttgggtctttgaaatgtttgatagaaattgaatttgagtctaccaaaatcaattcataaaaagtccttgacttcaggatggtagttggtttgtagtgaaatcctgacgggaaagccttggccgtcgccttgaagggttttttgtcccaaaattcaggttccatctgcaaaatagttgaaaatttatttttataaatataattgttagtttttttggtaggtggtgtttgtactttggctagggctagtttccctttagcattggtagctattttggtcattgatgcattttggatcattgtttgtaaattcgattcaaaatcatcgtcagattttgaggcaatatctgcccaagattttttgattattttttggaaatttggttagacccatgtcttgaggggcatgaagggtttcaattggccaagcatagtcagccgatg

SEQ ID NO: 15821 - DNA, 1116 bp, Glycine max
  Gm_smallRNAprecursor_8654
taagaacacagaagtttctggatcagctgctttgaggaattctggatgggatttgaaccagagtttcacttgttctggatctgctttggatgagtcgaattgagtccaccattttacaaatgcatgtctttgtagtgatggatattggtttgttttttcaatcttactgtaacgatattgccatgagaaaatccatgacagagcaaaactggaaaaatatttaagatctgctggaattcgtgattcctgagaattgtattgtttgtcaaattgagaaaatccttgttggattgtttctaggaatatctctggaattggaccaaagaaatcccaccattgtaaaaaccaatttggaaaattataaattgtgttggttttgaaatatatcagccatgaattcttgaagcgggtattttggtgccaaaaaaccttagtccaagcatcaatatagtcccaataggtataacctactgagtcaaatggtattgaaaatctctttcctttgtttaagtccgaaccaaaatgtcttggttgaagaacttttagtatttggattcttgagtgggtgttcaatgattggtcttttgggtctttgaaatgtttgatagaaattgaatttgagtctaccaaaatcaattcataaaaagtccttgacttcaggatggtagttggtttgtagtgaaatcctgacgggaaagccttggccgtcgccttgaagggttttttgtcccaaaattcaggttccatctgcaaaatagttgaaaatttatttttataaatataattgttagtttttttggtaggtggtgtttgtactttggctagggctagtttccctttagcattggtagctattttggtcattgatgcattttggatcattgtttgtaaattcgattcaaaatcatcgtcagattttgaggcaatatctgcccaagattttttgattattttttggaaatttggttagacccatgtcttgaggggcatgaagggtttcaattggccaagcatagtcagccgatgtttgtttgggggttgccggtttgggggattcctgagtggatggcttaggtttgactgagataatttgggtcgatgacccttcaaagttgg

SEQ ID NO: 15822 - DNA, 1233 bp, Glycine max
  Gm_smallRNAprecursor_8655
taagaacacagaagtttctggatcagctgctttgaggaattctggatgggatttgaaccagagtttcacttgttctggatctgctttggatgagtcgaattgagtccaccattttacaaatgcatgtctttgtagtgatggatattggtttgttttttcaatcttactgtaacgatattgccatgagaaaatccatgacagagcaaaactggaaaaatatttaagatctgctggaattcgtgattcctgagaattgtattgtttgtcaaattgagaaaatccttgttggattgtttctaggaatatctctggaattggaccaaagaaatcccaccattgtaaaaaccaatttggaaaattataaattgtgttggttttgaaatatatcagccatgaattcttgaagcgggtattttggtgccaaaaaaccttagtccaagcatcaatatagtcccaataggtataacctactgagtcaaatggtattgaaaatctctttcctttgtttaagtccgaaccaaaatgtcttggttgaagaacttttagtatttggattcttgagtgggtgttcaatgattggtcttttgggtctttgaaatgtttgatagaaattgaatttgagtctaccaaaatcaattcataaaaagtccttgacttcaggatggtagttggtttgtagtgaaatcctgacgggaaagccttggccgtcgccttgaagggttttttgtcccaaaattcaggttccatctgcaaaatagttgaaaatttatttttataaatataattgttagtttttttggtaggtggtgtttgtactttggctagggctagtttccctttagcattggtagctattttggtcattgatgcattttggatcattgtttgtaaattcgattcaaaatcatcgtcagattttgaggcaatatctgcccaagattttttgattattttttggaaatttggttagacccatgtcttgaggggcatgaagggtttcaattggccaagcatagtcagccgatgtttgtttgggggttgccggtttgggggattcctgagtggatggcttaggtttgactgagataatttgggtcgatgacccttcaaagttggttttctgggtggatgacccagccagggttggtgacccagaagaagttgaggatgattttttagtggacaactctggtagagccagcctagatccttttcctgtacctcgacctcctc

SEQ ID NO: 15823 - DNA, 1197 bp, Glycine max
  Gm_smallRNAprecursor_8656
gttttaataggactctagatgcacaagtattcatgaccttgtactggatcctatatattaaggctgctgggattgatccttctttcatgtcaaggccatgaaagtggatgtttaagaacagagagtcaagaatgtttatgtctatcagactcactgttttgtttggataatagttaaaatatattggaccttgtcctaggctggtttcgactgttccaattagggagtcttcaaattgattatgcctaatgtctcttagacacattaaaactgctgcatctatgcccatatcaattaagggcttgatggctacttgtacacaaccgatgtgtagatatttatacttacggctatgttcataaattgaattttttgaaagtaaatgaaattcttcccctaaatcttgtcctagaggaatattgttttctactgttttgattatgtaatcaaagttgtgtttgtcctttattgtttcaggaacgtatagttgatcctgagggatttctggaatgttccagtcatccatgttttgattgatatcttcgaatcggacttcctcaacgaagagattgtgttttggggcgacctcttgggtctggttgtcatgatcatttaataaattggagtttcttgaggaagatgaggaggaggagtttgagcgaaaagagatatgggaaaaagatcgtaatagtctagacatgattataatattctctaatatctttgccctcatttggttccatagaaatatctccgtaagtatatatgtcacaaaatttttctagatctgaattatttttaagaaaaactcttttttttttttttgaaaaacagtttgaacggcaatcctatagccaccagtgtattatgtcttgatattttggttaaacagtacaccttagccttaccgccctttatccaacacgggtcttactgctacagtaccattcaactaaaatattagattgctatacttctaggaagtactgttcaaacacttactgtacaaatcaaagtaaaaaattacgtgtactatacaagatttttagttccagatccataaaatttgttaacatatgtccttacggacagtattcctacttccccatcaggctctgataccagagatcagcggaatacgatcaaacggacagataggaagtaagaatgcagtaggataaatgaaagtgaaatata

SEQ ID NO: 15824 - DNA, 1074 bp, Glycine max
  Gm_smallRNAprecursor_8657
tgtctatcagactcactgttttgtttggataatagttaaaatatattggaccttgtcctaggctggtttcgactgttccaattagggagtcttcaaattgattatgcctaatgtctcttagacacattaaaactgctgcatctatgcccatatcaattaagggcttgatggctacttgtacacaaccgatgtgtagatatttatacttacggctatgttcataaattgaattttttgaaagtaaatgaaattcttcccctaaatcttgtcctagaggaatattgttttctactgttttgattatgtaatcaaagttgtgtttgtcctttattgtttcaggaacgtatagttgatcctgagggatttctggaatgttccagtcatccatgttttgattgatatcttcgaatcggacttcctcaacgaagagattgtgttttggggcgacctcttgggtctggttgtcatgatcatttaataaattggagtttcttgaggaagatgaggaggaggagtttgagcgaaaagagatatgggaaaaagatcgtaatagtctagacatgattataatattctctaatatctttgccctcatttggttccatagaaatatctccgtaagtatatatgtcacaaaatttttctagatctgaattatttttaagaaaaactcttttttttttttttgaaaaacagtttgaacggcaatcctatagccaccagtgtattatgtcttgatattttggttaaacagtacaccttagccttaccgccctttatccaacacgggtcttactgctacagtaccattcaactaaaatattagattgctatacttctaggaagtactgttcaaacacttactgtacaaatcaaagtaaaaaattacgtgtactatacaagatttttagttccagatccataaaatttgttaacatatgtccttacggacagtattcctacttccccatcaggctctgataccagagatcagcggaatacgatcaaacggacagataggaagtaagaatgcagtaggataaatgaaagtgaaatataaactgtaaagcagca

SEQ ID NO: 15825 - DNA, 1054 bp, Glycine max
  Gm_smallRNAprecursor_8658
tgaaagtaaatgaaattcttcccctaaatcttgtcctagaggaatattgttttctactgttttgattatgtaatcaaagttgtgtttgtcctttattgtttcaggaacgtatagttgatcctgagggatttctggaatgttccagtcatccatgttttgattgatatcttcgaatcggacttcctcaacgaagagattgtgttttggggcgacctcttgggtctggttgtcatgatcatttaataaattggagtttcttgaggaagatgaggaggaggagtttgagcgaaaagagatatgggaaaaagatcgtaatagtctagacatgattataatattctctaatatctttgccctcatttggttccatagaaatatctccgtaagtatatatgtcacaaaatttttctagatctgaattatttttaagaaaaactcttttttttttttttgaaaaacagtttgaacggcaatcctatagccaccagtgtattatgtcttgatattttggttaaacagtacaccttagccttaccgccctttatccaacacgggtcttactgctacagtaccattcaactaaaatattagattgctatacttctaggaagtactgttcaaacacttactgtacaaatcaaagtaaaaaattacgtgtactatacaagatttttagttccagatccataaaatttgttaacatatgtccttacggacagtattcctacttccccatcaggctctgataccagagatcagcggaatacgatcaaacggacagataggaagtaagaatgcagtaggataaatgaaagtgaaatataaactgtaaagcagcagatatcaagggcacaccgaaacgacttacaaacccaggttttcgaaaacaaagaaaccgaagcggcggcagagccgcacaggatcggtgaggggagaagggagatatgaaaaacggaacttgaaatttattgaaaccgaaagaaaagcttacaaagagtttttccctaggtagagcttctctctctaaaatcctgattctgagactatctgaaag

SEQ ID NO: 15826 - DNA, 1031 bp, Glycine max
  Gm_smallRNAprecursor_8659
ccttctgtaaaatgtctttggctgatttgcagtcaacccttactaaaaatttttgatttaataaatcagattgaaatttggaaatgcacaaaacaattgctaaaacttcttttttgacagttgaatactttaattgtgcaggattccagtgttttgaagtatatgcaatgacatgttcttgaccatgtacttgttgtttgaggatgccaccgtaaccgatgtctgatgcatcagtttcgacaattttgaatgcctgtggaatgggaagatacagacattttatggattggactttgactttgatttctttaactgtttgggtatgtaggtcagaccaaggaggcggatttttctttagcctatcatgcaatggtttaacaatattgtttaagtaggggacaaattctcctacgtaatttagacagcctagaaatctttgtaactgggttttgtctaagatttggttggggaatttgctagcaaactctattgacctttcgattggaatgattgtaccttgataaatattgtgaccaaggaatcgaattcgagtttggaaaggattaatttttgattcggagactgccaaaccattttgtttgataatatggatgaaggtttggagatgtttgaaatgttggtcaatgttttgggaaaagattaaaacatcatctatgtagacaatgacaaattttgaatagggattaaaaatgtcattcataattttttgaaattctgaaggggcattcttcagtccgaattcataattttttaaaaatgacaagcattttttggtggctataggattgccgttcaaactgtttttcaaaaaaaaaaaaagagtttttcttaaaaataattcagatccagaaaaattttgtgacatatttacttacggagatatttctatggaaccaaatgagggcaaagatattagagaatattataatcatgtctagactattacgatctttttcccgtatctcttttcgctcaaactcctcctcatcatcttcctcaagaaactccaa

SEQ ID NO: 15827 - DNA, 1080 bp, Glycine max
  Gm_smallRNAprecursor_8660
tgatttcgttttagaaacaatggccctatttgacacaggggctgattcaaactgcattttagaaggattaattcctacaaaattctttgagaaaacctcagaaaaattaagtacggcaaatggctcaaaattaaaaattaattttaagctatcaaatgcaatcattgaaaaccaagggcttaggattaacacaaactttcttctggtaaaaaaccttaagaatgaagtaatcttaggaacgcccttcattagagccctgtttcccatccaaatatctaatgaaggaataaccacaaattatttaggaagaaagattatatttaatttttcaactaaaccaatttccagaaatataaatcttatagaaaataagattaatcaaattaacttcttaaaagaagaagtatcttttaataatattcagatacaactaggaaaaccccaagtaaaaggaaaaaattcaatctttattaaatcatattgaatcaatcgtctgttctgaattgccacatgcattttgggacagaaagaaacatattgttgatctcccctatgagaaagactttagggaaaaacaaattcccacaaaagccagaccaatccaaatgaatgaagaacttcttcaatactgtcaaaaggaaatcaaggatttgcttgataaaggcctaatccggaaaagtaagagcccatggtcttgtgcggctttttatgtcaacaaacaatctgaaattgagcatggaacaccccgcttagtcataaaatacaaaccactaaatcaagcattacaatggattagatatcccattccaaacaaaaaagatttgcttaacagattaaattctgcaaaggtattttcaaaatttgatatgaaatctggattttggcaaatccaaatccaagaatcagataggtacaaaacagcgtttactgtaccctttaaattactgcattcttacttcctatctatccattacggaccaatttgttaacatatatatatttgtgaggtatgactaccttctgagcttgtgcttgttttatttaaattccttggatcatgagcaactaggtgtgtcctac

SEQ ID NO: 15828 - DNA, 1234 bp, Glycine max
  Gm_smallRNAprecursor_8661
ttacttcctatctatccattacggaccaatttgttaacatatatatatttgtgaggtatgactaccttctgagcttgtgcttgttttatttaaattccttggatcatgagcaactaggtgtgtcctactatgacttgaaaaacaaaaggtgatcaaataacaagcagaaatttaaagggtactaggttgcctcctactagcacttctttaacgtcttgagctggacgcgtgatgacttgtcggtcacggacctagtacttttgcttaccattttgtttgataatatggatgaaggtttggagatgtttgaaatgttggtcaatgatttgggaaaagattaaaacatcatctatgtagacaatgacaaattttgaatagggataaaaaatgtcattcataattttttgaaattctgaaggggcattcttcagtccgaatggcattacattccattcatattgccttcagaatttcaaaaaattatgaatgacatttttaatccctattcaaaatttgtcattgtctacatagatgatgttttaatcttttcccaaaacattgaccaacatttcaaacatctccaaaccttcatccatattatcaaaccaaatggtttggcagtctccaaatcaaaaattaatcttttccaaactcgaattcgattccttggtcacaatatttatcaaggtacaatcattccaattgaaaggtcaatagagtttgctagcaaattccccaaccaaatcttagacaaaacccagttacaaagatttctaggctgtctaaattacgtaggagaatttgtcccctacttaaacaatattgtcaaaccattgcatgataggctaaagaaaaatccgcctccttggtctgacctacatacccaaacagttaaagaaatcaaagtcaaagtccaatccataaaatgtctgtatcttcccattccacaggcattcaaaattgtcaaaattgatgcatcagacatcggttacggtggcatcctcaaacaacaagtacatggtcaagaacatgtcattgcatatacttcaaaacactggaatcctgcacaattaaagtattcaactgtcaaaaaagaagttttagcaattgttttgtgcatttccaaatttcaatctgatttattaaatcaaaaatttttagtaagggttgactgcaaatcagccaaagacattttacagaaggatgtaaaaaaccttgcctcaaaacagatttt

SEQ ID NO: 15829 - DNA, 1234 bp, Glycine max
  Gm_smallRNAprecursor_8662
gttttatttggataacaattaaaatatattggaccttgtcctaggctggtttcggctgttccacaaaagccagaccaatccaaatgaatgaagaacttcttcaatactgtcaaaaggaaatcaaggatttgcttgataaaggcctaatccggaaaagcaaaagcccatggtcttgtgcggctttttatgtcaacaaacaatctgagattgagcgcggaacaccccgcttagtcataaattacaaaccactaaatcaagcattacaatggattagatatcctattccaaacaaaaaagatttgcttaacagattaaattctgcaaagatattttcaaaatttgatatgaaatctggattttggcaaatccaaatccaagaatcagataggtacaaaatagcgtttactgtacctttcgggcaatatgaatggaatgtaatgccattcggactgaagaatgcccctttagaatttcaaaaaattatgaatgatattttaaatccctattcaaaatttgtcattgtctacatagatgatgttttaatcttttcccaaaacattgaccagcatttcaaacatctccaaaccttcatccatatcatcaaacaaaatggtttggcagtctccaaatcaaaaatcaatcttttccaaacacgaattcgattccttggtcacaatatttatcaaggtacaattgttccaatcgaaaggtcaattgagtttgctagcaaattccccaaccaaatcttagacaaaacccagttacaaagatttctaggttgtctaaattacgtaggtgaatttgtcccctacttaaacaatattgtcaaaccattgcatgataggctaaagaaaaatccgcctccttggtctgacctccatacccaaacagttaaagaaatcaaagtcaaagtccaatccataaaatgtctgtatcttcccattccacaggcattcaaaattgtcgaaactgatgcatcagacatcggttacggtggcatcctcaaacaacaagtacatggtcaagaacatgtcatcgcatatacttcaaaacactggaatcctgcacaattaaagtattcaactgttaaaaaagaagttttagcaattgttttatgcatttccaaatttcaatctgatttattaaatcaaaaatttttagtaagagttgactgcaaatcagccaaagacattttacagaaggatgtaaaaaaccttgcctcaaaacagatttt

SEQ ID NO: 15830 - DNA, 1157 bp, Glycine max
  Gm_smallRNAprecursor_8663
cctattccaaacaaaaaagatttgcttaacagattaaattctgcaaagatattttcaaaatttgatatgaaatctggattttggcaaatccaaatccaagaatcagataggtacaaaatagcgtttactgtacctttcgggcaatatgaatggaatgtaatgccattcggactgaagaatgcccctttagaatttcaaaaaattatgaatgatattttaaatccctattcaaaatttgtcattgtctacatagatgatgttttaatcttttcccaaaacattgaccagcatttcaaacatctccaaaccttcatccatatcatcaaacaaaatggtttggcagtctccaaatcaaaaatcaatcttttccaaacacgaattcgattccttggtcacaatatttatcaaggtacaattgttccaatcgaaaggtcaattgagtttgctagcaaattccccaaccaaatcttagacaaaacccagttacaaagatttctaggttgtctaaattacgtaggtgaatttgtcccctacttaaacaatattgtcaaaccattgcatgataggctaaagaaaaatccgcctccttggtctgacctccatacccaaacagttaaagaaatcaaagtcaaagtccaatccataaaatgtctgtatcttcccattccacaggcattcaaaattgtcgaaactgatgcatcagacatcggttacggtggcatcctcaaacaacaagtacatggtcaagaacatgtcatcgcatatacttcaaaacactggaatcctgcacaattaaagtattcaactgttaaaaaagaagttttagcaattgttttatgcatttccaaatttcaatctgatttattaaatcaaaaatttttagtaagagttgactgcaaatcagccaaagacattttacagaaggatgtaaaaaaccttgcctcaaaacagatttttgcaagatggcaagcaattttaagtgtctttgattttaatatagaatatatcaagggctcttccaactctctacctgactacctcacccgtgaatttttacagaaaattcccgatgcctcctaaggtgtctagttcctccggcagaggaggaagacccagtacaaaaggtaaagaagttctactggctctaccagagccaa

SEQ ID NO: 15831 - DNA, 1038 bp, Glycine max
  Gm_smallRNAprecursor_8664
tacctttcgggcaatatgaatggaatgtaatgccattcggactgaagaatgcccctttagaatttcaaaaaattatgaatgatattttaaatccctattcaaaatttgtcattgtctacatagatgatgttttaatcttttcccaaaacattgaccagcatttcaaacatctccaaaccttcatccatatcatcaaacaaaatggtttggcagtctccaaatcaaaaatcaatcttttccaaacacgaattcgattccttggtcacaatatttatcaaggtacaattgttccaatcgaaaggtcaattgagtttgctagcaaattccccaaccaaatcttagacaaaacccagttacaaagatttctaggttgtctaaattacgtaggtgaatttgtcccctacttaaacaatattgtcaaaccattgcatgataggctaaagaaaaatccgcctccttggtctgacctccatacccaaacagttaaagaaatcaaagtcaaagtccaatccataaaatgtctgtatcttcccattccacaggcattcaaaattgtcgaaactgatgcatcagacatcggttacggtggcatcctcaaacaacaagtacatggtcaagaacatgtcatcgcatatacttcaaaacactggaatcctgcacaattaaagtattcaactgttaaaaaagaagttttagcaattgttttatgcatttccaaatttcaatctgatttattaaatcaaaaatttttagtaagagttgactgcaaatcagccaaagacattttacagaaggatgtaaaaaaccttgcctcaaaacagatttttgcaagatggcaagcaattttaagtgtctttgattttaatatagaatatatcaagggctcttccaactctctacctgactacctcacccgtgaatttttacagaaaattcccgatgcctcctaaggtgtctagttcctccggcagaggaggaagacccagtacaaaaggtaaagaagttctactggctctaccagagccaataaccaaaagg

SEQ ID NO: 15832 - DNA, 1122 bp, Glycine max
  Gm_smallRNAprecursor_8665
agatataggcctcaccaaaataccaaaattagccaaaaagacctgggcagaaatggcctcagaatcagacgatgactctgaaacagatctgcaaaaacaaatccaaaaagccaaacagaccaaaaccgtctgtaaccaaaaaccaagccaatcgttgactcaacaagaattaacaccacaacccggtaacagttacatttcaaaaaacaaatttttcaatgttttacaaatggaaccagaatactgggacaagaatcctttcaaagcaaccgctaaagtattccccccgggattccattacaggccaatagccacaaacaaaacccgcaaattctacgaattcatcctaatagatacaaactcagtatctattaaacacttcaaagaccccaaaaatccaaatctaaatacccattccacaatccaaatcttgaaggtgattcagccacgacattatggctcaaacttaaaccaacccaaaaaattctctgcaccatttgaccctgcaggatataattattgggattacattgacgcctggaccaatgtgttctggcatcaaaatagtaaattcaagcattcatggctgatttacttcaaaaataatactgcatataattttccaaattggttcctccaatggtggaactatttcggaccaattccacaaatacttccagaagaagtccaacagggattcgaacaattcaataagctctataatagcaaggaatcacgtattccgacagatttaaagtacttttccagttttgccttgtcatggatcttttcatggcaatacagatacggaaaaactgaaaacaacaagcaatatccaccgttacagagacacgcctttgtaaaatggtggtcacaatttgatacttcaaaggctgctccagatcaagtcaagaactggttccagagcaatcctgagttccttaaacctgctgatccggagacatctttgtttctaaatcagaagtcgcaactggcagcattcttagcaagctcaaaatctaaagagagtcttgctcagaatctcaaagaagttctccaactacttcaacaggaagtggaagaagaaccttccaagaaggaagctgaatcatccgagactaa

SEQ ID NO: 15833 - DNA, 1049 bp, Glycine max
  Gm_smallRNAprecursor_8666
caatgttttacaaatggaaccagaatactgggacaagaatcctttcaaagcaaccgctaaagtattccccccgggattccattacaggccaatagccacaaacaaaacccgcaaattctacgaattcatcctaatagatacaaactcagtatctattaaacacttcaaagaccccaaaaatccaaatctaaatacccattccacaatccaaatcttgaaggtgattcagccacgacattatggctcaaacttaaaccaacccaaaaaattctctgcaccatttgaccctgcaggatataattattgggattacattgacgcctggaccaatgtgttctggcatcaaaatagtaaattcaagcattcatggctgatttacttcaaaaataatactgcatataattttccaaattggttcctccaatggtggaactatttcggaccaattccacaaatacttccagaagaagtccaacagggattcgaacaattcaataagctctataatagcaaggaatcacgtattccgacagatttaaagtacttttccagttttgccttgtcatggatcttttcatggcaatacagatacggaaaaactgaaaacaacaagcaatatccaccgttacagagacacgcctttgtaaaatggtggtcacaatttgatacttcaaaggctgctccagatcaagtcaagaactggttccagagcaatcctgagttccttaaacctgctgatccggagacatctttgtttctaaatcagaagtcgcaactggcagcattcttagcaagctcaaaatctaaagagagtcttgctcagaatctcaaagaagttctccaactacttcaacaggaagtggaagaagaaccttccaagaaggaagctgaatcatccgagactaatgatgaccaagaagatgatccattctaccagaatgaagatgaatgttttggtatatcattggacgacgattaattagttgtagtaatcatgaattattgtaactaatttgacagtttcttttaaataatgtaatttgtaaaag

SEQ ID NO: 15834 - DNA, 1131 bp, Glycine max
  Gm_smallRNAprecursor_8667
caatgttttacaaatggaaccagaatactgggacaagaatcctttcaaagcaaccgctaaagtattccccccgggattccattacaggccaatagccacaaacaaaacccgcaaattctacgaattcatcctaatagatacaaactcagtatctattaaacacttcaaagaccccaaaaatccaaatctaaatacccattccacaatccaaatcttgaaggtgattcagccacgacattatggctcaaacttaaaccaacccaaaaaattctctgcaccatttgaccctgcaggatataattattgggattacattgacgcctggaccaatgtgttctggcatcaaaatagtaaattcaagcattcatggctgatttacttcaaaaataatactgcatataattttccaaattggttcctccaatggtggaactatttcggaccaattccacaaatacttccagaagaagtccaacagggattcgaacaattcaataagctctataatagcaaggaatcacgtattccgacagatttaaagtacttttccagttttgccttgtcatggatcttttcatggcaatacagatacggaaaaactgaaaacaacaagcaatatccaccgttacagagacacgcctttgtaaaatggtggtcacaatttgatacttcaaaggctgctccagatcaagtcaagaactggttccagagcaatcctgagttccttaaacctgctgatccggagacatctttgtttctaaatcagaagtcgcaactggcagcattcttagcaagctcaaaatctaaagagagtcttgctcagaatctcaaagaagttctccaactacttcaacaggaagtggaagaagaaccttccaagaaggaagctgaatcatccgagactaatgatgaccaagaagatgatccattctaccagaatgaagatgaatgttttggtatatcattggacgacgattaattagttgtagtaatcatgaattattgtaactaatttgacagtttcttttaaataatgtaatttgtaaaagttttgtaacggtcccggtaaacattaccgatactgtagaaacagtaaaaattgggtctatttaaaggagtccccgtcccctt

SEQ ID NO: 15835 - DNA, 1131 bp, Glycine max; identical to SEQ ID NO: 15834
  Gm_smallRNAprecursor_8668

SEQ ID NO: 15836 - DNA, 1086 bp, Glycine max
  Gm_smallRNAprecursor_8669
caaagcaaccgctaaagtattccccccgggattccattacaggccaatagccacaaacaaaacccgcaaattctacgaattcatcctaatagatacaaactcagtatctattaaacacttcaaagaccccaaaaatccaaatctaaatacccattccacaatccaaatcttgaaggtgattcagccacgacattatggctcaaacttaaaccaacccaaaaaattctctgcaccatttgaccctgcaggatataattattgggattacattgacgcctggaccaatgtgttctggcatcaaaatagtaaattcaagcattcatggctgatttacttcaaaaataatactgcatataattttccaaattggttcctccaatggtggaactatttcggaccaattccacaaatacttccagaagaagtccaacagggattcgaacaattcaataagctctataatagcaaggaatcacgtattccgacagatttaaagtacttttccagttttgccttgtcatggatcttttcatggcaatacagatacggaaaaactgaaaacaacaagcaatatccaccgttacagagacacgcctttgtaaaatggtggtcacaatttgatacttcaaaggctgctccagatcaagtcaagaactggttccagagcaatcctgagttccttaaacctgctgatccggagacatctttgtttctaaatcagaagtcgcaactggcagcattcttagcaagctcaaaatctaaagagagtcttgctcagaatctcaaagaagttctccaactacttcaacaggaagtggaagaagaaccttccaagaaggaagctgaatcatccgagactaatgatgaccaagaagatgatccattctaccagaatgaagatgaatgttttggtatatcattggacgacgattaattagttgtagtaatcatgaattattgtaactaatttgacagtttcttttaaataatgtaatttgtaaaagttttgtaacggtcccggtaaacattaccgatactgtagaaacagtaaaaattgggtctatttaaaggagtccccgtcccctt

SEQ ID NO: 15837 - DNA, 1086 bp, Glycine max; identical to SEQ ID NO: 15836
  Gm_smallRNAprecursor_8670

SEQ ID NO: 15838 - DNA, 1085 bp, Glycine max
  Gm_smallRNAprecursor_8671
aaagcaaccgctaaagtattccccccgggattccattacaggccaatagccacaaacaaaacccgcaaattctacgaattcatcctaatagatacaaactcagtatctattaaacacttcaaagaccccaaaaatccaaatctaaatacccattccacaatccaaatcttgaaggtgattcagccacgacattatggctcaaacttaaaccaacccaaaaaattctctgcaccatttgaccctgcaggatataattattgggattacattgacgcctggaccaatgtgttctggcatcaaaatagtaaattcaagcattcatggctgatttacttcaaaaataatactgcatataattttccaaattggttcctccaatggtggaactatttcggaccaattccacaaatacttccagaagaagtccaacagggattcgaacaattcaataagctctataatagcaaggaatcacgtattccgacagatttaaagtacttttccagttttgccttgtcatggatcttttcatggcaatacagatacggaaaaactgaaaacaacaagcaatatccaccgttacagagacacgcctttgtaaaatggtggtcacaatttgatacttcaaaggctgctccagatcaagtcaagaactggttccagagcaatcctgagttccttaaacctgctgatccggagacatctttgtttctaaatcagaagtcgcaactggcagcattcttagcaagctcaaaatctaaagagagtcttgctcagaatctcaaagaagttctccaactacttcaacaggaagtggaagaagaaccttccaagaaggaagctgaatcatccgagactaatgatgaccaagaagatgatccattctaccagaatgaagatgaatgttttggtatatcattggacgacgattaattagttgtagtaatcatgaattattgtaactaatttgacagtttcttttaaataatgtaatttgtaaaagttttgtaacggtcccggtaaacattaccgatactgtagaaacagtaaaaattgggtctatttaaaggagtccccgtcccctt

SEQ ID NO: 15839 - DNA, 1085 bp, Glycine max; identical to SEQ ID NO: 15838
  Gm_smallRNAprecursor_8672

SEQ ID NO: 15840 - DNA, 1149 bp, Glycine max
  Gm_smallRNAprecursor_8673
agcaaccgctaaagtattccccccgggattccattacaggccaatagccacaaacaaaacccgcaaattctacgaattcatcctaatagatacaaactcagtatctattaaacacttcaaagaccccaaaaatccaaatctaaatacccattccacaatccaaatcttgaaggtgattcagccacgacattatggctcaaacttaaaccaacccaaaaaattctctgcaccatttgaccctgcaggatataattattgggattacattgacgcctggaccaatgtgttctggcatcaaaatagtaaattcaagcattcatggctgatttacttcaaaaataatactgcatataattttccaaattggttcctccaatggtggaactatttcggaccaattccacaaatacttccagaagaagtccaacagggattcgaacaattcaataagctctataatagcaaggaatcacgtattccgacagatttaaagtacttttccagttttgccttgtcatggatcttttcatggcaatacagatacggaaaaactgaaaacaacaagcaatatccaccgttacagagacacgcctttgtaaaatggtggtcacaatttgatacttcaaaggctgctccagatcaagtcaagaactggttccagagcaatcctgagttccttaaacctgctgatccggagacatctttgtttctaaatcagaagtcgcaactggcagcattcttagcaagctcaaaatctaaagagagtcttgctcagaatctcaaagaagttctccaactacttcaacaggaagtggaagaagaaccttccaagaaggaagctgaatcatccgagactaatgatgaccaagaagatgatccattctaccagaatgaagatgaatgttttggtatatcattggacgacgattaattagttgtagtaatcatgaattattgtaactaatttgacagtttcttttaaataatgtaatttgtaaaagttttgtaacggtcccggtaaacattaccgatactgtagaaacagtaaaaattgggtctatttaaaggagtccccgtcccctttgtgaggcaccctttcagatagtcccagaatcaggtttttagagagagaagctctgcctagggaaa

SEQ ID NO: 15841 - DNA, 1165 bp, Glycine max
  Gm_smallRNAprecursor_8674
ctaatagatacaaactcagtatctattaaacacttcaaagaccccaaaaatccaaatctaaatacccattccacaatccaaatcttgaaggtgattcagccacgacattatggctcaaacttaaaccaacccaaaaaattctctgcaccatttgaccctgcaggatataattattgggattacattgacgcctggaccaatgtgttctggcatcaaaatagtaaattcaagcattcatggctgatttacttcaaaaataatactgcatataattttccaaattggttcctccaatggtggaactatttcggaccaattccacaaatacttccagaagaagtccaacagggattcgaacaattcaataagctctataatagcaaggaatcacgtattccgacagatttaaagtacttttccagttttgccttgtcatggatcttttcatggcaatacagatacggaaaaactgaaaacaacaagcaatatccaccgttacagagacacgcctttgtaaaatggtggtcacaatttgatacttcaaaggctgctccagatcaagtcaagaactggttccagagcaatcctgagttccttaaacctgctgatccggagacatctttgtttctaaatcagaagtcgcaactggcagcattcttagcaagctcaaaatctaaagagagtcttgctcagaatctcaaagaagttctccaactacttcaacaggaagtggaagaagaaccttccaagaaggaagctgaatcatccgagactaatgatgaccaagaagatgatccattctaccagaatgaagatgaatgttttggtatatcattggacgacgattaattagttgtagtaatcatgaattattgtaactaatttgacagtttcttttaaataatgtaatttgtaaaagttttgtaacggtcccggtaaacattaccgatactgtagaaacagtaaaaattgggtctatttaaaggagtccccgtcccctttgtgaggcaccctttcagatagtcccagaatcaggtttttagagagagaagctctgcctagggaaaaactctttgtaagcttttctttcggttttaataaatttcaagttctatttttcatatctcccttctcccctcaccgatcctgtgcggctctgccgccg

SEQ ID NO: 15842 - DNA, 1086 bp, Glycine max
  Gm_smallRNAprecursor_8675
taaatacccattccacaatccaaatcttgaaggtgattcagccacgacattatggctcaaacttaaaccaacccaaaaaattctctgcaccatttgaccctgcaggatataattattgggattacattgacgcctggaccaatgtgttctggcatcaaaatagtaaattcaagcattcatggctgatttacttcaaaaataatactgcatataattttccaaattggttcctccaatggtggaactatttcggaccaattccacaaatacttccagaagaagtccaacagggattcgaacaattcaataagctctataatagcaaggaatcacgtattccgacagatttaaagtacttttccagttttgccttgtcatggatcttttcatggcaatacagatacggaaaaactgaaaacaacaagcaatatccaccgttacagagacacgcctttgtaaaatggtggtcacaatttgatacttcaaaggctgctccagatcaagtcaagaactggttccagagcaatcctgagttccttaaacctgctgatccggagacatctttgtttctaaatcagaagtcgcaactggcagcattcttagcaagctcaaaatctaaagagagtcttgctcagaatctcaaagaagttctccaactacttcaacaggaagtggaagaagaaccttccaagaaggaagctgaatcatccgagactaatgatgaccaagaagatgatccattctaccagaatgaagatgaatgttttggtatatcattggacgacgattaattagttgtagtaatcatgaattattgtaactaatttgacagtttcttttaaataatgtaatttgtaaaagttttgtaacggtcccggtaaacattaccgatactgtagaaacagtaaaaattgggtctatttaaaggagtccccgtcccctttgtgaggcaccctttcagatagtcccagaatcaggtttttagagagagaagctctgcctagggaaaaactctttgtaagcttttctttcggttttaataaatttcaagttctatttttcatatctcccttctcccctcaccga

SEQ ID NO: 15843 - DNA, 1137 bp, Glycine max
  Gm_smallRNAprecursor_8676
taaatacccattccacaatccaaatcttgaaggtgattcagccacgacattatggctcaaacttaaaccaacccaaaaaattctctgcaccatttgaccctgcaggatataattattgggattacattgacgcctggaccaatgtgttctggcatcaaaatagtaaattcaagcattcatggctgatttacttcaaaaataatactgcatataattttccaaattggttcctccaatggtggaactatttcggaccaattccacaaatacttccagaagaagtccaacagggattcgaacaattcaataagctctataatagcaaggaatcacgtattccgacagatttaaagtacttttccagttttgccttgtcatggatcttttcatggcaatacagatacggaaaaactgaaaacaacaagcaatatccaccgttacagagacacgcctttgtaaaatggtggtcacaatttgatacttcaaaggctgctccagatcaagtcaagaactggttccagagcaatcctgagttccttaaacctgctgatccggagacatctttgtttctaaatcagaagtcgcaactggcagcattcttagcaagctcaaaatctaaagagagtcttgctcagaatctcaaagaagttctccaactacttcaacaggaagtggaagaagaaccttccaagaaggaagctgaatcatccgagactaatgatgaccaagaagatgatccattctaccagaatgaagatgaatgttttggtatatcattggacgacgattaattagttgtagtaatcatgaattattgtaactaatttgacagtttcttttaaataatgtaatttgtaaaagttttgtaacggtcccggtaaacattaccgatactgtagaaacagtaaaaattgggtctatttaaaggagtccccgtcccctttgtgaggcaccctttcagatagtcccagaatcaggtttttagagagagaagctctgcctagggaaaaactctttgtaagcttttctttcggttttaataaatttcaagttctatttttcatatctcccttctcccctcaccgatcctgtgcggctctgccgccgcttcggtttctttgttttcaaaaacctggg

SEQ ID NO: 15844 - DNA, 1121 bp, Glycine max
  Gm_smallRNAprecursor_8677
cattccacaatccaaatcttgaaggtgattcagccacgacattatggctcaaacttaaaccaacccaaaaaattctctgcaccatttgaccctgcaggatataattattgggattacattgacgcctggaccaatgtgttctggcatcaaaatagtaaattcaagcattcatggctgatttacttcaaaaataatactgcatataattttccaaattggttcctccaatggtggaactatttcggaccaattccacaaatacttccagaagaagtccaacagggattcgaacaattcaataagctctataatagcaaggaatcacgtattccgacagatttaaagtacttttccagttttgccttgtcatggatcttttcatggcaatacagatacggaaaaactgaaaacaacaagcaatatccaccgttacagagacacgcctttgtaaaatggtggtcacaatttgatacttcaaaggctgctccagatcaagtcaagaactggttccagagcaatcctgagttccttaaacctgctgatccggagacatctttgtttctaaatcagaagtcgcaactggcagcattcttagcaagctcaaaatctaaagagagtcttgctcagaatctcaaagaagttctccaactacttcaacaggaagtggaagaagaaccttccaagaaggaagctgaatcatccgagactaatgatgaccaagaagatgatccattctaccagaatgaagatgaatgttttggtatatcattggacgacgattaattagttgtagtaatcatgaattattgtaactaatttgacagtttcttttaaataatgtaatttgtaaaagttttgtaacggtcccggtaaacattaccgatactgtagaaacagtaaaaattgggtctatttaaaggagtccccgtcccctttgtgaggcaccctttcagatagtcccagaatcaggtttttagagagagaagctctgcctagggaaaaactctttgtaagcttttctttcggttttaataaatttcaagttctatttttcatatctcccttctcccctcaccgatcctgtgcggctctgccgccgcttcggtttctttgttttcaaa

SEQ ID NO: 15845 - DNA, 1048 bp, Glycine max
  Gm_smallRNAprecursor_8678
attccacaatccaaatcttgaaggtgattcagccacgacattatggctcaaacttaaaccaacccaaaaaattctctgcaccatttgaccctgcaggatataattattgggattacattgacgcctggaccaatgtgttctggcatcaaaatagtaaattcaagcattcatggctgatttacttcaaaaataatactgcatataattttccaaattggttcctccaatggtggaactatttcggaccaattccacaaatacttccagaagaagtccaacagggattcgaacaattcaataagctctataatagcaaggaatcacgtattccgacagatttaaagtacttttccagttttgccttgtcatggatcttttcatggcaatacagatacggaaaaactgaaaacaacaagcaatatccaccgttacagagacacgcctttgtaaaatggtggtcacaatttgatacttcaaaggctgctccagatcaagtcaagaactggttccagagcaatcctgagttccttaaacctgctgatccggagacatctttgtttctaaatcagaagtcgcaactggcagcattcttagcaagctcaaaatctaaagagagtcttgctcagaatctcaaagaagttctccaactacttcaacaggaagtggaagaagaaccttccaagaaggaagctgaatcatccgagactaatgatgaccaagaagatgatccattctaccagaatgaagatgaatgttttggtatatcattggacgacgattaattagttgtagtaatcatgaattattgtaactaatttgacagtttcttttaaataatgtaatttgtaaaagttttgtaacggtcccggtaaacattaccgatactgtagaaacagtaaaaattgggtctatttaaaggagtccccgtcccctttgtgaggcaccctttcagatagtcccagaatcaggtttttagagagagaagctctgcctagggaaaaactctttgtaagcttttctttcggttttaataaatttcaagttctat

SEQ ID NO: 15846 - DNA, 1048 bp, Glycine max; identical to SEQ ID NO: 15845
  Gm_smallRNAprecursor_8679

SEQ ID NO: 15847 - DNA, 1080 bp, Glycine max
  Gm_smallRNAprecursor_8680
attccacaatccaaatcttgaaggtgattcagccacgacattatggctcaaacttaaaccaacccaaaaaattctctgcaccatttgaccctgcaggatataattattgggattacattgacgcctggaccaatgtgttctggcatcaaaatagtaaattcaagcattcatggctgatttacttcaaaaataatactgcatataattttccaaattggttcctccaatggtggaactatttcggaccaattccacaaatacttccagaagaagtccaacagggattcgaacaattcaataagctctataatagcaaggaatcacgtattccgacagatttaaagtacttttccagttttgccttgtcatggatcttttcatggcaatacagatacggaaaaactgaaaacaacaagcaatatccaccgttacagagacacgcctttgtaaaatggtggtcacaatttgatacttcaaaggctgctccagatcaagtcaagaactggttccagagcaatcctgagttccttaaacctgctgatccggagacatctttgtttctaaatcagaagtcgcaactggcagcattcttagcaagctcaaaatctaaagagagtcttgctcagaatctcaaagaagttctccaactacttcaacaggaagtggaagaagaaccttccaagaaggaagctgaatcatccgagactaatgatgaccaagaagatgatccattctaccagaatgaagatgaatgttttggtatatcattggacgacgattaattagttgtagtaatcatgaattattgtaactaatttgacagtttcttttaaataatgtaatttgtaaaagttttgtaacggtcccggtaaacattaccgatactgtagaaacagtaaaaattgggtctatttaaaggagtccccgtcccctttgtgaggcaccctttcagatagtcccagaatcaggtttttagagagagaagctctgcctagggaaaaactctttgtaagcttttctttcggttttaataaatttcaagttctatttttcatatctcccttctcccctcaccgatcc

SEQ ID NO: 15848 - DNA, 1098 bp, Glycine max
  Gm_smallRNAprecursor_8681
attccacaatccaaatcttgaaggtgattcagccacgacattatggctcaaacttaaaccaacccaaaaaattctctgcaccatttgaccctgcaggatataattattgggattacattgacgcctggaccaatgtgttctggcatcaaaatagtaaattcaagcattcatggctgatttacttcaaaaataatactgcatataattttccaaattggttcctccaatggtggaactatttcggaccaattccacaaatacttccagaagaagtccaacagggattcgaacaattcaataagctctataatagcaaggaatcacgtattccgacagatttaaagtacttttccagttttgccttgtcatggatcttttcatggcaatacagatacggaaaaactgaaaacaacaagcaatatccaccgttacagagacacgcctttgtaaaatggtggtcacaatttgatacttcaaaggctgctccagatcaagtcaagaactggttccagagcaatcctgagttccttaaacctgctgatccggagacatctttgtttctaaatcagaagtcgcaactggcagcattcttagcaagctcaaaatctaaagagagtcttgctcagaatctcaaagaagttctccaactacttcaacaggaagtggaagaagaaccttccaagaaggaagctgaatcatccgagactaatgatgaccaagaagatgatccattctaccagaatgaagatgaatgttttggtatatcattggacgacgattaattagttgtagtaatcatgaattattgtaactaatttgacagtttcttttaaataatgtaatttgtaaaagttttgtaacggtcccggtaaacattaccgatactgtagaaacagtaaaaattgggtctatttaaaggagtccccgtcccctttgtgaggcaccctttcagatagtcccagaatcaggtttttagagagagaagctctgcctagggaaaaactctttgtaagcttttctttcggttttaataaatttcaagttctatttttcatatctcccttctcccctcaccgatcctgtgcggctctgccgccg

SEQ ID NO: 15849 - DNA, 1120 bp, Glycine max
  Gm_smallRNAprecursor_8682
attccacaatccaaatcttgaaggtgattcagccacgacattatggctcaaacttaaaccaacccaaaaaattctctgcaccatttgaccctgcaggatataattattgggattacattgacgcctggaccaatgtgttctggcatcaaaatagtaaattcaagcattcatggctgatttacttcaaaaataatactgcatataattttccaaattggttcctccaatggtggaactatttcggaccaattccacaaatacttccagaagaagtccaacagggattcgaacaattcaataagctctataatagcaaggaatcacgtattccgacagatttaaagtacttttccagttttgccttgtcatggatcttttcatggcaatacagatacggaaaaactgaaaacaacaagcaatatccaccgttacagagacacgcctttgtaaaatggtggtcacaatttgatacttcaaaggctgctccagatcaagtcaagaactggttccagagcaatcctgagttccttaaacctgctgatccggagacatctttgtttctaaatcagaagtcgcaactggcagcattcttagcaagctcaaaatctaaagagagtcttgctcagaatctcaaagaagttctccaactacttcaacaggaagtggaagaagaaccttccaagaaggaagctgaatcatccgagactaatgatgaccaagaagatgatccattctaccagaatgaagatgaatgttttggtatatcattggacgacgattaattagttgtagtaatcatgaattattgtaactaatttgacagtttcttttaaataatgtaatttgtaaaagttttgtaacggtcccggtaaacattaccgatactgtagaaacagtaaaaattgggtctatttaaaggagtccccgtcccctttgtgaggcaccctttcagatagtcccagaatcaggtttttagagagagaagctctgcctagggaaaaactctttgtaagcttttctttcggttttaataaatttcaagttctatttttcatatctcccttctcccctcaccgatcctgtgcggctctgccgccgcttcggtttctttgttttcaaa

SEQ ID NO: 15850 - DNA, 1070 bp, Glycine max
  Gm_smallRNAprecursor_8683
tcaaacttaaaccaacccaaaaaattctctgcaccatttgaccctgcaggatataattattgggattacattgacgcctggaccaatgtgttctggcatcaaaatagtaaattcaagcattcatggctgatttacttcaaaaataatactgcatataattttccaaattggttcctccaatggtggaactatttcggaccaattccacaaatacttccagaagaagtccaacagggattcgaacaattcaataagctctataatagcaaggaatcacgtattccgacagatttaaagtacttttccagttttgccttgtcatggatcttttcatggcaatacagatacggaaaaactgaaaacaacaagcaatatccaccgttacagagacacgcctttgtaaaatggtggtcacaatttgatacttcaaaggctgctccagatcaagtcaagaactggttccagagcaatcctgagttccttaaacctgctgatccggagacatctttgtttctaaatcagaagtcgcaactggcagcattcttagcaagctcaaaatctaaagagagtcttgctcagaatctcaaagaagttctccaactacttcaacaggaagtggaagaagaaccttccaagaaggaagctgaatcatccgagactaatgatgaccaagaagatgatccattctaccagaatgaagatgaatgttttggtatatcattggacgacgattaattagttgtagtaatcatgaattattgtaactaatttgacagtttcttttaaataatgtaatttgtaaaagttttgtaacggtcccggtaaacattaccgatactgtagaaacagtaaaaattgggtctatttaaaggagtccccgtcccctttgtgaggcaccctttcagatagtcccagaatcaggtttttagagagagaagctctgcctagggaaaaactctttgtaagcttttctttcggttttaataaatttcaagttctatttttcatatctcccttctcccctcaccgatcctgtgcggctctgccgccgcttcggtttctttgttttc

SEQ ID NO: 15851 - DNA, 1071 bp, Glycine max
  Gm_smallRNAprecursor_8684
tcaaacttaaaccaacccaaaaaattctctgcaccatttgaccctgcaggatataattattgggattacattgacgcctggaccaatgtgttctggcatcaaaatagtaaattcaagcattcatggctgatttacttcaaaaataatactgcatataattttccaaattggttcctccaatggtggaactatttcggaccaattccacaaatacttccagaagaagtccaacagggattcgaacaattcaataagctctataatagcaaggaatcacgtattccgacagatttaaagtacttttccagttttgccttgtcatggatcttttcatggcaatacagatacggaaaaactgaaaacaacaagcaatatccaccgttacagagacacgcctttgtaaaatggtggtcacaatttgatacttcaaaggctgctccagatcaagtcaagaactggttccagagcaatcctgagttccttaaacctgctgatccggagacatctttgtttctaaatcagaagtcgcaactggcagcattcttagcaagctcaaaatctaaagagagtcttgctcagaatctcaaagaagttctccaactacttcaacaggaagtggaagaagaaccttccaagaaggaagctgaatcatccgagactaatgatgaccaagaagatgatccattctaccagaatgaagatgaatgttttggtatatcattggacgacgattaattagttgtagtaatcatgaattattgtaactaatttgacagtttcttttaaataatgtaatttgtaaaagttttgtaacggtcccggtaaacattaccgatactgtagaaacagtaaaaattgggtctatttaaaggagtccccgtcccctttgtgaggcaccctttcagatagtcccagaatcaggtttttagagagagaagctctgcctagggaaaaactctttgtaagcttttctttcggttttaataaatttcaagttctatttttcatatctcccttctcccctcaccgatcctgtgcggctctgccgccgcttcggtttctttgttttca

SEQ ID NO: 15852 - DNA, 1041 bp, Glycine max
  Gm_smallRNAprecursor_8685
tgcaccatttgaccctgcaggatataattattgggattacattgacgcctggaccaatgtgttctggcatcaaaatagtaaattcaagcattcatggctgatttacttcaaaaataatactgcatataattttccaaattggttcctccaatggtggaactatttcggaccaattccacaaatacttccagaagaagtccaacagggattcgaacaattcaataagctctataatagcaaggaatcacgtattccgacagatttaaagtacttttccagttttgccttgtcatggatcttttcatggcaatacagatacggaaaaactgaaaacaacaagcaatatccaccgttacagagacacgcctttgtaaaatggtggtcacaatttgatacttcaaaggctgctccagatcaagtcaagaactggttccagagcaatcctgagttccttaaacctgctgatccggagacatctttgtttctaaatcagaagtcgcaactggcagcattcttagcaagctcaaaatctaaagagagtcttgctcagaatctcaaagaagttctccaactacttcaacaggaagtggaagaagaaccttccaagaaggaagctgaatcatccgagactaatgatgaccaagaagatgatccattctaccagaatgaagatgaatgttttggtatatcattggacgacgattaattagttgtagtaatcatgaattattgtaactaatttgacagtttcttttaaataatgtaatttgtaaaagttttgtaacggtcccggtaaacattaccgatactgtagaaacagtaaaaattgggtctatttaaaggagtccccgtcccctttgtgaggcaccctttcagatagtcccagaatcaggtttttagagagagaagctctgcctagggaaaaactctttgtaagcttttctttcggttttaataaatttcaagttctatttttcatatctcccttctcccctcaccgatcctgtgcggctctgccgccgcttcggtttctttgttttc

SEQ ID NO: 15853 - DNA, 1146 bp, Glycine max
  Gm_smallRNAprecursor_8686
cattatacgatttcatgatgaaaacatggatgattttagtgaggatcaggatcaacatttctttgatcacattaatcaccaaagtgatgaccaaagcgatgaccaaagcagcgacacctccgtcacctccgttgcaatatcaccaacctaggtgtccagtgacttgaactttgaccacctactacactacattgatcgacaccattttgttcatcagcaacataatgtacaaccaccaatcggtgcactcgaggttggcatgaccttcgatgaaaaaacacaatgtattcgagtagttaaagaatacaacatcagaaatccttttgattgcagaataatttactttgactagagaagggtaaacttcgtgtataaattgcatgaaaatggttgtacatggagcttgggcgcatgcaattcaaagaggcataaaaaatggattatcaaacacgtcatagcacaaatcatccaaccaattgtcaaaacaaacccaaccgtctccatcaagacgttgattgcagatatcaaaacgttcatgaattataccccatcctacaagaagacatggttagcaaagcaaaaagcgttggagatgatttatggaaactaggaagaatcatacgccaaactgccaaaacttttgggagctttgcaatcttgtgttcccgggactgtggtcgctgctcaaacaggatccgtgtatgagggaggagaaatagtaccgggcaaaagattgtttaaacgtgtcttttggtcatttggtctatgcattaatggctttgcatattgcaaacccatagtacaagtagatggtacatggctttatgggaatatgggaagtatactggcatactgttgatagataccgcacaagatggagctaaccatatcttcccgattgcctacgccattgtagaaggggagacaacttcagcttggggttttttctagagaatttgagaagacatgttactccgcaaattaacatttctctcatttcaaaccaacacccctcaattataagtgcctacaacaacccaagtaacttatgggtccaggacacatcccatttcttttgcctgcaccacaatgcacaaaactttcttcgcggtaactcaaactgcaaacatttaaagaaaccactca

SEQ ID NO: 15854 - DNA, 1076 bp, Glycine max
  Gm_smallRNAprecursor_8687
acctaggtgtccagtgacttgaactttgaccacctactacactacattgatcgacaccattttgttcatcagcaacataatgtacaaccaccaatcggtgcactcgaggttggcatgaccttcgatgaaaaaacacaatgtattcgagtagttaaagaatacaacatcagaaatccttttgattgcagaataatttactttgactagagaagggtaaacttcgtgtataaattgcatgaaaatggttgtacatggagcttgggcgcatgcaattcaaagaggcataaaaaatggattatcaaacacgtcatagcacaaatcatccaaccaattgtcaaaacaaacccaaccgtctccatcaagacgttgattgcagatatcaaaacgttcatgaattataccccatcctacaagaagacatggttagcaaagcaaaaagcgttggagatgatttatggaaactaggaagaatcatacgccaaactgccaaaacttttgggagctttgcaatcttgtgttcccgggactgtggtcgctgctcaaacaggatccgtgtatgagggaggagaaatagtaccgggcaaaagattgtttaaacgtgtcttttggtcatttggtctatgcattaatggctttgcatattgcaaacccatagtacaagtagatggtacatggctttatgggaatatgggaagtatactggcatactgttgatagataccgcacaagatggagctaaccatatcttcccgattgcctacgccattgtagaaggggagacaacttcagcttggggttttttctagagaatttgagaagacatgttactccgcaaattaacatttctctcatttcaaaccaacacccctcaattataagtgcctacaacaacccaagtaacttatgggtccaggacacatcccatttcttttgcctgcaccacaatgcacaaaactttcttcgcggtaactcaaactgcaaacatttaaagaaaccactcatgttagctggtgagaatctattttatttattcgttaaacttttctttcaatcaaattttataacataatagattg

SEQ ID NO: 15855 - DNA, 1075 bp, Glycine max
  Gm_smallRNAprecursor_8688
cctaggtgtccagtgacttgaactttgaccacctactacactacattgatcgacaccattttgttcatcagcaacataatgtacaaccaccaatcggtgcactcgaggttggcatgaccttcgatgaaaaaacacaatgtattcgagtagttaaagaatacaacatcagaaatccttttgattgcagaataatttactttgactagagaagggtaaacttcgtgtataaattgcatgaaaatggttgtacatggagcttgggcgcatgcaattcaaagaggcataaaaaatggattatcaaacacgtcatagcacaaatcatccaaccaattgtcaaaacaaacccaaccgtctccatcaagacgttgattgcagatatcaaaacgttcatgaattataccccatcctacaagaagacatggttagcaaagcaaaaagcgttggagatgatttatggaaactaggaagaatcatacgccaaactgccaaaacttttgggagctttgcaatcttgtgttcccgggactgtggtcgctgctcaaacaggatccgtgtatgagggaggagaaatagtaccgggcaaaagattgtttaaacgtgtcttttggtcatttggtctatgcattaatggctttgcatattgcaaacccatagtacaagtagatggtacatggctttatgggaatatgggaagtatactggcatactgttgatagataccgcacaagatggagctaaccatatcttcccgattgcctacgccattgtagaaggggagacaacttcagcttggggttttttctagagaatttgagaagacatgttactccgcaaattaacatttctctcatttcaaaccaacacccctcaattataagtgcctacaacaacccaagtaacttatgggtccaggacacatcccatttcttttgcctgcaccacaatgcacaaaactttcttcgcggtaactcaaactgcaaacatttaaagaaaccactcatgttagctggtgagaatctattttatttattcgttaaacttttctttcaatcaaattttataacataatagattg

SEQ ID NO: 15856 - DNA, 1066 bp, Glycine max
  Gm_smallRNAprecursor_8689
ggtgtccagtgacttgaactttgaccacctactacactacattgatcgacaccattttgttcatcagcaacataatgtacaaccaccaatcggtgcactcgaggttggcatgaccttcgatgaaaaaacacaatgtattcgagtagttaaagaatacaacatcagaaatccttttgattgcagaataatttactttgactagagaagggtaaacttcgtgtataaattgcatgaaaatggttgtacatggagcttgggcgcatgcaattcaaagaggcataaaaaatggattatcaaacacgtcatagcacaaatcatccaaccaattgtcaaaacaaacccaaccgtctccatcaagacgttgattgcagatatcaaaacgttcatgaattataccccatcctacaagaagacatggttagcaaagcaaaaagcgttggagatgatttatggaaactaggaagaatcatacgccaaactgccaaaacttttgggagctttgcaatcttgtgttcccgggactgtggtcgctgctcaaacaggatccgtgtatgagggaggagaaatagtaccgggcaaaagattgtttaaacgtgtcttttggtcatttggtctatgcattaatggctttgcatattgcaaacccatagtacaagtagatggtacatggctttatgggaatatgggaagtatactggcatactgttgatagataccgcacaagatggagctaaccatatcttcccgattgcctacgccattgtagaaggggagacaacttcagcttggggttttttctagagaatttgagaagacatgttactccgcaaattaacatttctctcatttcaaaccaacacccctcaattataagtgcctacaacaacccaagtaacttatgggtccaggacacatcccatttcttttgcctgcaccacaatgcacaaaactttcttcgcggtaactcaaactgcaaacatttaaagaaaccactcatgttagctggtgagaatctattttatttattcgttaaacttttctttcaatcaaattttataacataata

SEQ ID NO: 15857 - DNA, 1067 bp, Glycine max
  Gm_smallRNAprecursor_8690
ggtgtccagtgacttgaactttgaccacctactacactacattgatcgacaccattttgttcatcagcaacataatgtacaaccaccaatcggtgcactcgaggttggcatgaccttcgatgaaaaaacacaatgtattcgagtagttaaagaatacaacatcagaaatccttttgattgcagaataatttactttgactagagaagggtaaacttcgtgtataaattgcatgaaaatggttgtacatggagcttgggcgcatgcaattcaaagaggcataaaaaatggattatcaaacacgtcatagcacaaatcatccaaccaattgtcaaaacaaacccaaccgtctccatcaagacgttgattgcagatatcaaaacgttcatgaattataccccatcctacaagaagacatggttagcaaagcaaaaagcgttggagatgatttatggaaactaggaagaatcatacgccaaactgccaaaacttttgggagctttgcaatcttgtgttcccgggactgtggtcgctgctcaaacaggatccgtgtatgagggaggagaaatagtaccgggcaaaagattgtttaaacgtgtcttttggtcatttggtctatgcattaatggctttgcatattgcaaacccatagtacaagtagatggtacatggctttatgggaatatgggaagtatactggcatactgttgatagataccgcacaagatggagctaaccatatcttcccgattgcctacgccattgtagaaggggagacaacttcagcttggggttttttctagagaatttgagaagacatgttactccgcaaattaacatttctctcatttcaaaccaacacccctcaattataagtgcctacaacaacccaagtaacttatgggtccaggacacatcccatttcttttgcctgcaccacaatgcacaaaactttcttcgcggtaactcaaactgcaaacatttaaagaaaccactcatgttagctggtgagaatctattttatttattcgttaaacttttctttcaatcaaattttataacataatag

SEQ ID NO: 15858 - DNA, 1065 bp, Glycine max
  Gm_smallRNAprecursor_8691
gtgtccagtgacttgaactttgaccacctactacactacattgatcgacaccattttgttcatcagcaacataatgtacaaccaccaatcggtgcactcgaggttggcatgaccttcgatgaaaaaacacaatgtattcgagtagttaaagaatacaacatcagaaatccttttgattgcagaataatttactttgactagagaagggtaaacttcgtgtataaattgcatgaaaatggttgtacatggagcttgggcgcatgcaattcaaagaggcataaaaaatggattatcaaacacgtcatagcacaaatcatccaaccaattgtcaaaacaaacccaaccgtctccatcaagacgttgattgcagatatcaaaacgttcatgaattataccccatcctacaagaagacatggttagcaaagcaaaaagcgttggagatgatttatggaaactaggaagaatcatacgccaaactgccaaaacttttgggagctttgcaatcttgtgttcccgggactgtggtcgctgctcaaacaggatccgtgtatgagggaggagaaatagtaccgggcaaaagattgtttaaacgtgtcttttggtcatttggtctatgcattaatggctttgcatattgcaaacccatagtacaagtagatggtacatggctttatgggaatatgggaagtatactggcatactgttgatagataccgcacaagatggagctaaccatatcttcccgattgcctacgccattgtagaaggggagacaacttcagcttggggttttttctagagaatttgagaagacatgttactccgcaaattaacatttctctcatttcaaaccaacacccctcaattataagtgcctacaacaacccaagtaacttatgggtccaggacacatcccatttcttttgcctgcaccacaatgcacaaaactttcttcgcggtaactcaaactgcaaacatttaaagaaaccactcatgttagctggtgagaatctattttatttattcgttaaacttttctttcaatcaaattttataacataata

SEQ ID NO: 15859 - DNA, 1092 bp, Glycine max
  Gm_smallRNAprecursor_8692
cacaacacttctcccaaaatattcaaagtagcagttttccctctctataacatactagtcttaacggttatccaaaaaacacatgtaacacatctatcagagatgtcaagttagcataagagttgagaaagatgcaatgttgttaatggcggaaagtcaaaattccgccataaaaatatggcggatggcgtagcggaaaatggcggatgtcatggcggacaaaaaaaaaaaaacatatatataaactcattgaaattgaaaaaaacaaaggattgcattcaaatacactaaaaaagtttcatgagttcatacaataatcaagtaccaacaccacataaactcattaaagagttcaaaataagaaaatgataaaaacataatgcaaagtgcaaagtgaggctctaatcatcttctccaatcccaacataatcatcttcgttgttatcatatggtaatgaagcatctccctctccctcttccccatcagacgcctcaaaattgaccatgatttcttcttcttcagattcaacatcaatatttttctcaacatctagatcctcatcattttcttggactgctttttgcttccttgatgaagatccaacaaccattgcctgttttttagaagtttgggcagcagcaacacttgttttttgctttttccgcctagtatacatcctacactctccaacccccgaagcctgatacacagttgcccaatttagagcatcatcatcttcaaataccaaatcatttccagcatcattatcatcatcttgatccatctctcccacgagccattcattgcatacatcaatatcattaagagaaattggatcaatttcatctcttgcattatatcttggcttcaattgttggttgtatttgacaaacaccaaatcatgcaacctcttgtgctcaagcctatttctttttttggaatgaatctacaacataacaaataaatgttgatttcaatctcaaatatactccaaataaaacttgatcatcaaaattaaataaaattaaaaagtatagttagagttttgtcacaattacttgctcaaacacactccaatttctttcacatcc

SEQ ID NO: 15860 - DNA, 1133 bp, Glycine max
  Gm_smallRNAprecursor_8693
atggcgtagcggaaaatggcggatgtcatggcggacaaaaaaaaaaaaacatatatataaactcattgaaattgaaaaaaacaaaggattgcattcaaatacactaaaaaagtttcatgagttcatacaataatcaagtaccaacaccacataaactcattaaagagttcaaaataagaaaatgataaaaacataatgcaaagtgcaaagtgaggctctaatcatcttctccaatcccaacataatcatcttcgttgttatcatatggtaatgaagcatctccctctccctcttccccatcagacgcctcaaaattgaccatgatttcttcttcttcagattcaacatcaatatttttctcaacatctagatcctcatcattttcttggactgctttttgcttccttgatgaagatccaacaaccattgcctgttttttagaagtttgggcagcagcaacacttgttttttgctttttccgcctagtatacatcctacactctccaacccccgaagcctgatacacagttgcccaatttagagcatcatcatcttcaaataccaaatcatttccagcatcattatcatcatcttgatccatctctcccacgagccattcattgcatacatcaatatcattaagagaaattggatcaatttcatctcttgcattatatcttggcttcaattgttggttgtatttgacaaacaccaaatcatgcaacctcttgtgctcaagcctatttctttttttggaatgaatctacaacataacaaataaatgttgatttcaatctcaaatatactccaaataaaacttgatcatcaaaattaaataaaattaaaaagtatagttagagttttgtcacaattacttgctcaaacacactccaatttctttcacatcctaaagcactgcaagttaaactcaaaatcttaatagctagcttctgcaaatttggagtttgtgacccaaacattcgccaccaatatgctgcaataccaattaccaaccaagagcataacttagaattctgaattataacactaatacataaaaaaaatagtatgataaaagtttcttactaggagaatgggttttcctttgagccattgcaaagtcggaaccaaag

SEQ ID NO: 15861 - DNA, 1080 bp, Glycine max
  Gm_smallRNAprecursor_8694
aacaaccttccatctaagagagaacccaaccgcgagcctcccctgcaccagccgcgtccctcccgcaccccacacgcgcaacgagccgcgacacccgcagccgcacgcgcacgcagctgcgacgacctccggcagcgacacaccggcacaaacggcggtgacgagctccggcaacgacgcacctgtcacgaacggcggcctgcagcgagaagttctcgcggagaagacgaagctgtcgcgaagaagaagaagacgcaggttttcttagttttatttttgctgtttgacaccccctgttttctgtctgcagctttttttttccttttgctatttgacacccctttttacttttaacagtcccattttttttttcgtatttgacaccacaatttttttttttgttcagtcctcttttaaatggctgagtttatttgaactctttaatgagtttatttggtgttggtacttgattattgtatgaactcatgaaacttttttagtttatttgaatgcaatcctttgttttttttcaatttcaatgagtttatatatatgttttttttttttttggtccgccatgacatccgccattttccgctacgccatccgccatatttttatggcagattttttactttccgccatgaaccgccatccgccattaacaacattggactgaccttacccattgggtatagttctaaccattcaatttatggccaatgatgaagtgagtaagcccatcgtgtgagctggtcgaaaatgatccagtatccactgtgagcaattcatcagtcatggcttggcggcactagatttagggatggttcagatcgagcttttattttccctttaatacgtgaatggtacagggagatatatagataatgcacaacgcaaagctaagagcaataatctagcctagaaatcaagggaattgatctccctataaatgcaaattctaaatatgataaagacaaaaatgacagctaataaatatgtacataaaatcctaatgagcagtacaaacagaatttgttgattctgtgttgatcttcaacaaaaaaacattaaaagaca

SEQ ID NO: 15862 - DNA, 1130 bp, Glycine max
  Gm_smallRNAprecursor_8695
tttacaagattggtgctgaccactttggttccgactttgcaatggctcaaaggaaaacccattctcctagtaagaaacttttatcatactattttttttatgtattagtgttataattcagaattctaagttatgctcttggttggtaattggtattgcagcatattggtggcgaatgtttgcatcacaaactccaaatttgcagaagctagctattaagattttgagtttcacttgcagtgcttcaggatgtgaaagaaattggagtgtgtttaagcaagtaattgtgacaaaactctaactatactttttaattttatttaatttttatgatcaagttttatttggagtatatttgagattgaaatcaacattatttgttatgttgtagattcattccaaaaaaagaaataggcttgagcacaagaggttgcatgatttggtgtttgtcaaatacaaccaacaattaaagcaaagatataatgcaagagatgaaattgatccaatttctcttaatgatattgatgtatgcaatgaatggctcgtgggagagatggatcaagatgatgataatgatgctggaaatgatttggtatttgaagatgatgatgctctaaattgggcaactgtgtatcaggcttcgggggttggagagtgtaggatgtacactaggcggaaaaagcaaaaaacaagtgttgctgctgcccaaacttctaaaaaacaggcaatggttgttggatcttcttcaaggaagcaaaaagtagtccaagaaaatgatgaggatctagatgttgaggagaatattgatgttgaatctaaagaagaagaaatcatggtcaattttgaggcgtttgatggggaagagggagagggagatgctccattaccatatgataacaacgaagatgattatgttgggattggagaagatgattagagcctcaaccttcactttgcactttgcattatgtttttatcattttcttattttgaactctttaatgagtttatttggtgttggtacttgattattgtatgaactcatgaaacttttttagtttatttgaatgcaatcctttgtttttttcaatttcaatgagtttatatatatgtttttttttgtccgccat

SEQ ID NO: 15863 - DNA, 1182 bp, Glycine max
  Gm_smallRNAprecursor_8696
agaagaagggaagcgcaaacgcggggagggaaagagagaggttacattttttaaaaaaattaacgaagggcatttttgccttttcacactaattgctgggtgcactagcaaaattgctgggtgcacctagcagcactctctatgcgcgactttttgagtttaagaaatagtgttgctaggtgcacccaacattattgctggtgcacccagcattctaagaaaatgacaaaagtgtccttgtttggtttttctcttccggatcaacttgatccgtaacttccagatcaacttaatccggaagtcttttacggatcaagttgatccggaagagactttcagattaacttgatccggaagaggaaaaataatttttttgttaattatacaagatatttaaagatatttatttcattaattataatataattaaatatatttatttattttattaattataatatatttataaatattgatttattataaataattaatgctaatcaatcataatcataattcatgttaatcaatcaatcatgctaatcaatcataattccctaaaagatgatataaataatttcagagttagcaatcataatgcagtttttgaaattgctaactctgaaattatttatattctcttttagggaattatgattgattagcataattgattgattagcatgaattatgattatgattgattgattagcatgattgattgattctgaaaattgctaactctgaaattatttatatcctcttatagggaattatgattgattagcatgaattatgattatgattgatcagcattaattatttataataaattaatatttataaatatattataatcaataaaataaacaaatatatttaattatattataattaatgaaataaatatatttaaatatcttgtataattaacaaaaattttatttttccttttccagatcaagttgatccggaagtctcttatacattatatttttttaatttccttttaatatatatatttttattattttgatttatttatcaaaccttaatctttgctgttaagaaaaactgtatgttgtatcttataattttatcaaatttctactaaatttttcaattttaatatttaaaattattccatattgcaattccaacttaagtgtcctcatatttaga

SEQ ID NO: 15864 - DNA, 1036 bp, Glycine max
  Gm_smallRNAprecursor_8697
aaaattaaagttaaataatttataataactcatgcatgataattggttgagctagacttattggtaatagtttcgattttgccacttgttttataatatgtttttttattggtttaatcataattatgttttatatttatttttattttaaaattgccagaaattctctgacagttcctaaattgccagaaattgattctatagtataaaaaattctaatgatttaattgtttagttatcgtcaaaatattctaggtgattttttaccattacaaaaatttatttacaactaccaaagtcttgacggcgagattgatttgaggacttaaaatgaggaaaaatcccttcttatagttcactgaatccgtgtccgtttgctggccattgcaaaatgctcttaggtacacctaacatttttttaaaatggtaaaattgtttttgctaattttttctttgatccgtatgttgatccatatgttgatccataagagacttacgaatcaacttgatttgtaacttgatccataaaagtgagacaccagcttccggatcaagttgatccgtaataggtttacggatcaacttatccgtaattgtttattaaaaatttaaaatataatatatacatttaaagatatttattttattaattataatataattaaatatatttatgtattttattaattatgatatatttataaatattgatttattataaataattaattttataatatttttttagaagatgatattaaaatacttactctgtcccattataattattgtttaaggttattttatacatattaataaaaatcaataaatagataaaagataataataattttataaaattaatattatcatcattaatttattttttatttttataattaatcatatcattaatattataaagaatataaataaaaaataattagtattatattaaaaattaaaatattaactattttataatacattttttttacatgatcattagtataggagggaaaatagtaattataag

SEQ ID NO: 15865 - DNA, 1157 bp, Glycine max
  Gm_smallRNAprecursor_8698
gtgggaatagtgtccgtaagggcatatgttaactgaacttatggatctgaaccatgtacagtagttttaatttaaacagtatatgtttgaatagtattttctggaagcacagcagtctgatattttagttgagcgatactgtagcagtaagtcccgtgattgagaaaggacagtaaggctaaggtgtattgttcaaataaaatattgagacataatatactggtggctataggagtagtgttcaaactatattgttcgtaaaaaaaaaaatctttttcatttgttcagacccaagaagttctgtaacatatagccttatgaaaatatttctatggaaccaaatgaaggcaaagacattagagaatgttataatcatgtctagactattgcgctctttttcccgtatctcttttcgatcaaattcctcctcatcatcttcttcaagaaattccaacttattaagtgatcaagataacctgacccaagaggtcgcccccaaacacaatctcttcgatgaggaagtctgattcgaagatatcaatcaaaacatggatgactggaacatttaaaaaatccctcaggatcaactataagttcctgaaacaattaaggacaaacacaactttgattacataatcaaaacagtagaaaacaatattcctctaggacaagatataggggaagaatttcatttactttcaaaaagttcaatttatgaacatagtcgtaagtataaatatctacacatcgactgtgtacaagtagccatcaagcccttaattgacatgggcatagatgcagcagttttaatgtgtctaagagatattaggcataataaatttcaagactccttaattggaacagtcgaaaccagcctaggacaaggtccaatatattttaattgttatccaaacaagacagtgagtctgatggacagaaacattcttgactctctgatcttaaacatccactttcatggccttgacatgaaagaaggatcaatcccagcagccttaatttataggatccagtacaaggtcatgaatacttgtgcatctagagtcctgttaaaacctcaaaaaggagaaacaactttgtttatcactgatatgacaaaggctaacgtttctctcccaagaaaaataaagtgggatgaa

SEQ ID NO: 15866 - DNA, 1104 bp, Glycine max
  Gm_smallRNAprecursor_8699
tattaatgatttttttatagaaacgatggccctatttgacacaggggctgattcaaactgcattttagaaggattaattcctacaaaattctttgagaaaacctcagaaaaattaagtacgacaaatggctcaaaattaaaaattaattttaagctatcaaatgcaatcattgaaaaccatggtcttaggattaacacaaactttcttctgataaaaaaaccttaagaacgaagtaatcctaggaacccccttcattagagccttgtttcccattcaaatatctaatgaaggaataaccacaaattatttaggaagaaaaattatatttaatttttctactaaaccaatctccagaaatataaatcttatagaaaataagattaatcaaattaacttcttaaaagaagaagtatcttttaataatattcagatacaactgggaaaaccccaagtaaaagaaaaaattcaatctttattaaatcatatcgaatcaactatatgttctgatttgccacatgcattttgggacagaaagaaacatattgttgatctcccttatgagaaagactttagggaaaaaaaaattcccacaaaagccagaccaatccaaatgaacgaagaacttcttcaatactgccaaaaggaaatcaaggatttgcttgataagggcctaatccggaaaagcaaaagcccatggtcttgtgcggctttttatgtcaacaaacaatctgagattgagcgtggaacaccccgcttagtcataaattacaaaccactaaatcaagcattacaatggattaggtatcctattccaaacaaaaaagatttgcttaacagattaaattctgcaaagatattttcaaaatttgatatgaaatctggattttggcaaatccaaatccaagaatcagataggtacaaaacaatgtttactgtaccttttgggcaatacgaatggaatgtgatgtcattcggactgaagaatgccccttcagaatttcaaaaaattatgaatgatatttttaatccttattcaaaatttgtcattgtcaacatagatgatgttttaatcttttcctaaaacatcgaccaacatttcaaac

SEQ ID NO: 15867 - DNA, 1239 bp, Glycine max
  Gm_smallRNAprecursor_8700
tcagaaaaattaagtacgacaaatggctcaaaattaaaaattaattttaagctatcaaatgcaatcattgaaaaccatggtcttaggattaacacaaactttcttctgataaaaaaaccttaagaacgaagtaatcctaggaacccccttcattagagccttgtttcccattcaaatatctaatgaaggaataaccacaaattatttaggaagaaaaattatatttaatttttctactaaaccaatctccagaaatataaatcttatagaaaataagattaatcaaattaacttcttaaaagaagaagtatcttttaataatattcagatacaactgggaaaaccccaagtaaaagaaaaaattcaatctttattaaatcatatcgaatcaactatatgttctgatttgccacatgcattttgggacagaaagaaacatattgttgatctcccttatgagaaagactttagggaaaaaaaaattcccacaaaagccagaccaatccaaatgaacgaagaacttcttcaatactgccaaaaggaaatcaaggatttgcttgataagggcctaatccggaaaagcaaaagcccatggtcttgtgcggctttttatgtcaacaaacaatctgagattgagcgtggaacaccccgcttagtcataaattacaaaccactaaatcaagcattacaatggattaggtatcctattccaaacaaaaaagatttgcttaacagattaaattctgcaaagatattttcaaaatttgatatgaaatctggattttggcaaatccaaatccaagaatcagataggtacaaaacaatgtttactgtaccttttgggcaatacgaatggaatgtgatgtcattcggactgaagaatgccccttcagaatttcaaaaaattatgaatgatatttttaatccttattcaaaatttgtcattgtcaacatagatgatgttttaatcttttcctaaaacatcgaccaacatttcaaacatctccagactttcatccatatcatcaaacagaatggtttggcagtctccaaatcaaaaatcaatcttttccaaactcgaattcgattccttggtcacaatatatatcaaggtacaatcattccaatagaaaggtcaatagagtttgctagcaaatttcccaaccaaatcttagacaaaacccagttacaaagatttctaggttgtctaaattatgtaggagaatttgtcccctattt

SEQ ID NO: 15868 - DNA, 1048 bp, Glycine max
  Gm_smallRNAprecursor_8701
gtcataaattacaaaccactaaatcaagcattacaatggattaggtatcctattccaaacaaaaaagatttgcttaacagattaaattctgcaaagatattttcaaaatttgatatgaaatctggattttggcaaatccaaatccaagaatcagataggtacaaaacaatgtttactgtaccttttgggcaatacgaatggaatgtgatgtcattcggactgaagaatgccccttcagaatttcaaaaaattatgaatgatatttttaatccttattcaaaatttgtcattgtcaacatagatgatgttttaatcttttcctaaaacatcgaccaacatttcaaacatctccagactttcatccatatcatcaaacagaatggtttggcagtctccaaatcaaaaatcaatcttttccaaactcgaattcgattccttggtcacaatatatatcaaggtacaatcattccaatagaaaggtcaatagagtttgctagcaaatttcccaaccaaatcttagacaaaacccagttacaaagatttctaggttgtctaaattatgtaggagaatttgtcccctatttaaacaatatattcaagccattgcatgataggctgaagaaaaatccgcctccttggtctgacctccatacacaaatagttaaagagatcaaactcaaagtccaatccataaaatgtttgtatcttcctattccacaggcatttaaaattgttgaaactgatgcatcagacataggttatggtggcatcctcaaacaaagagtccatggccaagatcatgtcattgcatatacatcaaaacattggaatcctgcacaattaaaatattcaactgttaaaaaggaagttttagcaattgttttgtgcatttccaaatttcaatcggatttgttaaaccaaaagtttttaatcagggttgattgtaaatcagccaaagatattttacaaaaagatgttaaaaaccttgtctcaaaacaaatttttgcaaggtggcaagcaattctaagtgtctttgattttgacatag

SEQ ID NO: 15869 - DNA, 1048 bp, Glycine max; identical to SEQ ID NO: 15868
  Gm_smallRNAprecursor_8702

SEQ ID NO: 15870 - DNA, 1049 bp, Glycine max
  Gm_smallRNAprecursor_8703
gtcataaattacaaaccactaaatcaagcattacaatggattaggtatcctattccaaacaaaaaagatttgcttaacagattaaattctgcaaagatattttcaaaatttgatatgaaatctggattttggcaaatccaaatccaagaatcagataggtacaaaacaatgtttactgtaccttttgggcaatacgaatggaatgtgatgtcattcggactgaagaatgccccttcagaatttcaaaaaattatgaatgatatttttaatccttattcaaaatttgtcattgtcaacatagatgatgttttaatcttttcctaaaacatcgaccaacatttcaaacatctccagactttcatccatatcatcaaacagaatggtttggcagtctccaaatcaaaaatcaatcttttccaaactcgaattcgattccttggtcacaatatatatcaaggtacaatcattccaatagaaaggtcaatagagtttgctagcaaatttcccaaccaaatcttagacaaaacccagttacaaagatttctaggttgtctaaattatgtaggagaatttgtcccctatttaaacaatatattcaagccattgcatgataggctgaagaaaaatccgcctccttggtctgacctccatacacaaatagttaaagagatcaaactcaaagtccaatccataaaatgtttgtatcttcctattccacaggcatttaaaattgttgaaactgatgcatcagacataggttatggtggcatcctcaaacaaagagtccatggccaagatcatgtcattgcatatacatcaaaacattggaatcctgcacaattaaaatattcaactgttaaaaaggaagttttagcaattgttttgtgcatttccaaatttcaatcggatttgttaaaccaaaagtttttaatcagggttgattgtaaatcagccaaagatattttacaaaaagatgttaaaaaccttgtctcaaaacaaatttttgcaaggtggcaagcaattctaagtgtctttgattttgacataga

SEQ ID NO: 15871 - DNA, 1049 bp, Glycine max; identical to SEQ ID NO: 15870
  Gm_smallRNAprecursor_8704

SEQ ID NO: 15872 - DNA, 1050 bp, Glycine max
  Gm_smallRNAprecursor_8705
gtcataaattacaaaccactaaatcaagcattacaatggattaggtatcctattccaaacaaaaaagatttgcttaacagattaaattctgcaaagatattttcaaaatttgatatgaaatctggattttggcaaatccaaatccaagaatcagataggtacaaaacaatgtttactgtaccttttgggcaatacgaatggaatgtgatgtcattcggactgaagaatgccccttcagaatttcaaaaaattatgaatgatatttttaatccttattcaaaatttgtcattgtcaacatagatgatgttttaatcttttcctaaaacatcgaccaacatttcaaacatctccagactttcatccatatcatcaaacagaatggtttggcagtctccaaatcaaaaatcaatcttttccaaactcgaattcgattccttggtcacaatatatatcaaggtacaatcattccaatagaaaggtcaatagagtttgctagcaaatttcccaaccaaatcttagacaaaacccagttacaaagatttctaggttgtctaaattatgtaggagaatttgtcccctatttaaacaatatattcaagccattgcatgataggctgaagaaaaatccgcctccttggtctgacctccatacacaaatagttaaagagatcaaactcaaagtccaatccataaaatgtttgtatcttcctattccacaggcatttaaaattgttgaaactgatgcatcagacataggttatggtggcatcctcaaacaaagagtccatggccaagatcatgtcattgcatatacatcaaaacattggaatcctgcacaattaaaatattcaactgttaaaaaggaagttttagcaattgttttgtgcatttccaaatttcaatcggatttgttaaaccaaaagtttttaatcagggttgattgtaaatcagccaaagatattttacaaaaagatgttaaaaaccttgtctcaaaacaaatttttgcaaggtggcaagcaattctaagtgtctttgattttgacatagaa

SEQ ID NO: 15873 - DNA, 1047 bp, Glycine max
  Gm_smallRNAprecursor_8706
tcataaattacaaaccactaaatcaagcattacaatggattaggtatcctattccaaacaaaaaagatttgcttaacagattaaattctgcaaagatattttcaaaatttgatatgaaatctggattttggcaaatccaaatccaagaatcagataggtacaaaacaatgtttactgtaccttttgggcaatacgaatggaatgtgatgtcattcggactgaagaatgccccttcagaatttcaaaaaattatgaatgatatttttaatccttattcaaaatttgtcattgtcaacatagatgatgttttaatcttttcctaaaacatcgaccaacatttcaaacatctccagactttcatccatatcatcaaacagaatggtttggcagtctccaaatcaaaaatcaatcttttccaaactcgaattcgattccttggtcacaatatatatcaaggtacaatcattccaatagaaaggtcaatagagtttgctagcaaatttcccaaccaaatcttagacaaaacccagttacaaagatttctaggttgtctaaattatgtaggagaatttgtcccctatttaaacaatatattcaagccattgcatgataggctgaagaaaaatccgcctccttggtctgacctccatacacaaatagttaaagagatcaaactcaaagtccaatccataaaatgtttgtatcttcctattccacaggcatttaaaattgttgaaactgatgcatcagacataggttatggtggcatcctcaaacaaagagtccatggccaagatcatgtcattgcatatacatcaaaacattggaatcctgcacaattaaaatattcaactgttaaaaaggaagttttagcaattgttttgtgcatttccaaatttcaatcggatttgttaaaccaaaagtttttaatcagggttgattgtaaatcagccaaagatattttacaaaaagatgttaaaaaccttgtctcaaaacaaatttttgcaaggtggcaagcaattctaagtgtctttgattttgacatag

SEQ ID NO: 15874 - DNA, 1163 bp, Glycine max
  Gm_smallRNAprecursor_8707
aaaaataatcaaaaaatcttgggcagacattgcctcagaatctgatgatgattctgaatcaaatttacaaacaatgatccaaaatgcatcattgaccaaaacaactaccaatcctaaaggaaaactacctttagccaaagcacaaacaccacctaccagacaaactagcaattatatttataaaaataaatttttaactgttttgcagatggaacctgaattttgggacaaaaatcccttcaaggcgatggccaaggctttcccaccaggatttcactacaaaccaaccaccatcttgaagacaagaactttttatgagttgattttggtagattcaaattcagtatctatcaaacatttcaaagacccaaaagaccaaacattaaacacccactccacaatccaaatactaaaagttcttcaaccaagacactttggttcggacttgaacaaaggaaagagattttcagttccatttgatccggtaggttatacctattgggattatgttgatgcttggacaaaggtgttttggcaccaaaatacccgcttcaggcattcatggctgatatatttcaagaccaatacaatttacaattttcccaattggtttttacaatggtgggacttctttggaccaattccagagatattcccagaaacagtccaacaaggatttgctcaatttgagagacaatacaattcgcaggaatcacgaattccagtagatcttaaatacttctcaagctttgcactgtcatggatcttctcatggcaatatcgttacagcaagactgataagacaaaccaatatccatcactacaaagacacgcatttgtaaaatggtggacgtatatatatatatatatatatatatatatatatatatatatatatatatatatatatatatatatatatatatatatatattattgaattgttgaacatggattaattagttttattgttgtcgatccaattaactttaaattgaagattaaatggccgataaaaaaattgaagatgaaactttggtcatgttcttctacgattgtgagtaaaagagggtagaagtgtagaacaacaagtgaacactaattcctgaaattataaacattgttattatattaatctctgaaattataaaaaaatcaatcca

SEQ ID NO: 15875 - DNA, 1060 bp, Glycine max
  Gm_smallRNAprecursor_8708
aattatatttataaaaataaatttttaactgttttgcagatggaacctgaattttgggacaaaaatcccttcaaggcgatggccaaggctttcccaccaggatttcactacaaaccaaccaccatcttgaagacaagaactttttatgagttgattttggtagattcaaattcagtatctatcaaacatttcaaagacccaaaagaccaaacattaaacacccactccacaatccaaatactaaaagttcttcaaccaagacactttggttcggacttgaacaaaggaaagagattttcagttccatttgatccggtaggttatacctattgggattatgttgatgcttggacaaaggtgttttggcaccaaaatacccgcttcaggcattcatggctgatatatttcaagaccaatacaatttacaattttcccaattggtttttacaatggtgggacttctttggaccaattccagagatattcccagaaacagtccaacaaggatttgctcaatttgagagacaatacaattcgcaggaatcacgaattccagtagatcttaaatacttctcaagctttgcactgtcatggatcttctcatggcaatatcgttacagcaagactgataagacaaaccaatatccatcactacaaagacacgcatttgtaaaatggtggacgtatatatatatatatatatatatatatatatatatatatatatatatatatatatatatatatatatatatatatatatattattgaattgttgaacatggattaattagttttattgttgtcgatccaattaactttaaattgaagattaaatggccgataaaaaaattgaagatgaaactttggtcatgttcttctacgattgtgagtaaaagagggtagaagtgtagaacaacaagtgaacactaattcctgaaattataaacattgttattatattaatctctgaaattataaaaaaatcaatccaagtctttaaaattattaaatagcaatcatttggttttctcaaattccaaaacgatataatttaaat

SEQ ID NO: 15876 - DNA, 1080 bp, Glycine max
  Gm_smallRNAprecursor_8709
aattatatttataaaaataaatttttaactgttttgcagatggaacctgaattttgggacaaaaatcccttcaaggcgatggccaaggctttcccaccaggatttcactacaaaccaaccaccatcttgaagacaagaactttttatgagttgattttggtagattcaaattcagtatctatcaaacatttcaaagacccaaaagaccaaacattaaacacccactccacaatccaaatactaaaagttcttcaaccaagacactttggttcggacttgaacaaaggaaagagattttcagttccatttgatccggtaggttatacctattgggattatgttgatgcttggacaaaggtgttttggcaccaaaatacccgcttcaggcattcatggctgatatatttcaagaccaatacaatttacaattttcccaattggtttttacaatggtgggacttctttggaccaattccagagatattcccagaaacagtccaacaaggatttgctcaatttgagagacaatacaattcgcaggaatcacgaattccagtagatcttaaatacttctcaagctttgcactgtcatggatcttctcatggcaatatcgttacagcaagactgataagacaaaccaatatccatcactacaaagacacgcatttgtaaaatggtggacgtatatatatatatatatatatatatatatatatatatatatatatatatatatatatatatatatatatatatatatatattattgaattgttgaacatggattaattagttttattgttgtcgatccaattaactttaaattgaagattaaatggccgataaaaaaattgaagatgaaactttggtcatgttcttctacgattgtgagtaaaagagggtagaagtgtagaacaacaagtgaacactaattcctgaaattataaacattgttattatattaatctctgaaattataaaaaaatcaatccaagtctttaaaattattaaatagcaatcatttggttttctcaaattccaaaacgatataatttaaatttttaaaattataaaaaaga

SEQ ID NO: 15877 - DNA, 1130 bp, Glycine max
  Gm_smallRNAprecursor_8710
cactttggttctaactttttaatggctcaaaggaaaacccattctcctagtaagaaacttttaccatatgacaaatataaataccatactatttttttatgtattagtgttataattcataattctaagttatgctcttggttggtaattggtattgcagcatatttgtggcgaatgtttgggtcacaaactccaaatttgcagaaactagctattaaaattttgagtttgacttgcagtgcttcaggatgtgaaaaaaattggagtgtgtttgagcaagtaattgtgacaaaactctaactatactttttaattttatttaattttgatgatcaagttttatttggagtatatttgagattgaaatcaatatttatttgttacgttgtagattcattccaaaaaaagaaataggcttgagcacaagaggttgcatgatttggtgtttgtcaaatacaactaacaattgaagcaaagatataatgcaagagatgaaattgatccaatttctcttaatgatattgatgtgtgcaataaatggctcgtgggagagatggatcaagatgatgataatgatgctggaaatgatttggtatttgaagatgatgatgctctaaattgggcaactgtgtatcaggcttcgggggttggagagtgtaggatgtatactaggcggaaaaagcaaaaaacaagaagtgttactgctacacaaacttctaaaaaacagacaatggttgttggatcttcatcaaggaagcaaaaaacagtctaagaaaatgatgaggatctagattttgagaatattgatcttgaatctgaagaagaagaaatcatggtcaattttgaggcgtctgatggggaagagggagagggagatgctccattaccatatgataacaacgaagatgattatgttggaattggagaagatgattagaacctcaaccttcactttgcactttgcattatgtttttatcattttcttattttgaactctttaatgagtttatttggtgttggtacttgattattgtatgaactcatgaaatttttttagtttatttgaatgcaatccttttattttttttcaatttcaatgagtttatatatatgtatttttttttttgtc

SEQ ID NO: 15878 - DNA, 1190 bp, Glycine max
  Gm_smallRNAprecursor_8711
catttttcaattgtagagattgaaaaaaatattgctgacctacatctatgaatggttgtcggtagtagatttcatccactaattgatcgttggttagttgaagggtattgtgcattctacgcttgagtgtatcaagagaacagttgttaggaactcgcattggtgttggagtgggactttgaaaataaacaccagtttggttgtgagtgattgatccatttggaaaaatgaaggctaatctagagttagtaatggtctggctgcttgtttctcccaaaaatgacatagtaataagattgaatttggtttatgagagtatgttctgtgagattgtgcatttgtattgtgtgttgtgttatttatagttgtacgagtattttgccgtgttgatgtgtattggaatccaatgtttctttttccctagtaactgatgtagcaaacgtccattataatttcagagtgaaaaaagagattgagttgtccatctcatgtcagttttgcacacgtctctaaaaattaaatgtctcacctataaaactgacatgaaatggacagctcataatgtagagtgttgtcaattgggactgtgatttttcccatgtaattaaagcagcagacgttcatgataattttcagagtgaacaaagagattatgagttgtccatttcatgtcagttttgcaggtgagacatttaatttttagagacgtgtgcaaattgcagggtgttgtcaatttggactgtgatttttcccttgtaattaaagcagcaggcttccaagattattttcagagtgaacacagagattattagttgtccatttcatgttagttttttcgatgagacatttaatttttagaaacaatgtagtgtaaattgcaaagtattgtgaattttgacagttatgttaccatgtcaactattgcagtaaaagtaggtaaactgaaaattactaatttaaatttaaaggaaaaattatttcaatacgtaaagtgataactgaagatagacataagacattacatgaaaaagtgtgtcatgaatatcattaatgtgtttgacataattttaaaaaaatgcagaacatgggtacttacgcatagttgcaagggtgcaaatcatagttttttttttattttgtgcttctattttgaggtgttattccatggaactggtacacgatataatttt

SEQ ID NO: 15879 - DNA, 1190 bp, Glycine max
  Gm_smallRNAprecursor_8712
caacctctaatcttgaggacttatcaggtgaatacgagacttgttggctcaaacaccatgatagtgatacggactcctcttccgggcccgaaggaagtaacctgtctccatcccacgaacctatattcaaacgggattggtaatctacggatcattcatgtctaagttatttcttctttgagattttcatgtaatgtcttatgtctgtcttcagttatcactttacgtattgaaataatttttcctttaaatttaaattagcaattttcagtttacccacttttactgcagtagttgacatggtaacataactgtcaaaatttacaatactttgtcatttacactacactgtttttaaaaattaaatgtctcatcgacaaaactgacatgaaatggacaactcataatctctttattcactctgaaaataattatggatgtttgttgctttaattacaagggaaaaatcacaatccaaattgacaatactctgcaatttgcacacgtctctaaaaattaaatgtctcacctgcaaaactgccatgaaatggacagctcatcatctctttattcactctgaaaatcatcatgaacgtttgttgctttaattacatgggaaaaatcacagtccaaattaacaacactctgcattatgagctgtccatttcatatcagttttacaggtgatacatttaatttttagagacgtgtgcaaaactgacatgagatggacaactcataatctctttgttcactctgaaattataatggacgtctgctacatcacttactagggaaaaagaaacattggattccaatacacatcaacgtggcagaatactcatacaactataaataacacaacacagacacaatacaaacacacaatctcacacaacataatttcacaaaccaaattcaatcttattactatgtcatttttgggagaaacaagcaatcagaccattactaactctagattagctttcatttttccaaatggatcaatcagttacaaccaaattggtgtttattttcaaagtctcattccaatgccaatgtgagttcctaacaactgttcttttgatacactcaagtgtagaatgcacaacacccttcaactagccaacgatcaattactggatgaaatctactactgacagccattcatagatgcaggtcaacaatat

SEQ ID NO: 15880 - DNA, 1096 bp, Glycine max
  Gm_smallRNAprecursor_8713
ttttgaaaagtagttttcaaaagtattaaaattttaatactttccaaaatttagttttggcaaagagagaatgttgagaaaaaaaaatcaaataaaattatatgaaggaggtgaatttagcaaatggttggtgcattttagatggagttctacgctaattttcatccattgcattgaggccgaagtggaacatgactatccccagatagttcgtttttgtcgatgagtaaggatatatccttctacttcatcttcctacaatttctcctactacctttaattataagaattgaatgaaaaagtaaaattatataaagtctttggaagtataaaacacatttaaaacttactataaaagatagtaggagaatttgtagaaagatataacattactctttagagtaaagtactaaattagtccctcacttttggaggcgctgtcaatttggtccctgagatttaaaaaatgtcaaaatgatcctcgactttacattctgtttgccacgttagtccctgccgttagtagtctcttaacaccgttagtaaatgtgtgatgtggcacgttaagtgccacctggacgaacacgtggaacttccacatcagtttcttctacttgccacgtaaggagggactaaattgacattaaagggactaaaatgacataatttaggtgatctttttttctccaaaatgttaaaaccctaatggctactttaacattcacactttcattccatttttcctcctacccatactctcatccaattcttattctttttctattcatttttctccatctttgtagttcttcttctattattttgtggtctaccatgtctgttaattcaagcacaagggggaatgccacgtcaaactgtctttgctattgtcatagaagagctaccattcaaacaacaaggacggcaaggaataatgggagactgttttatgcttgtccattaccacaagtaagtaatgttaatggtgttttttgtattctaatttttgtgcaagattgaacatgggtattttgtgttgtgcagcaagatgcagatcgatgtaatttcttttcgtgggttgatgaagacattgatg

SEQ ID NO: 15881 - DNA, 1164 bp, Glycine max
  Gm_smallRNAprecursor_8714
caattttgctcaaattggatcctacaagtcctaaatcatgtataaatcgtatttaaaccaaaaacaagcttcaggtcaaggtaaatccaaacctaggtatccaaaacccatcaattgagtgaattttcaaggtttgagaagtgaaaatgagaatggggtaatcttggagtaaactctcatctcaaacaagtctataacattaatttagactttcgcaaactgatttcaaggcgaaaaccccaccgattcaaaatttgacccctcaacacccaatttaccctagaaatggctcatgctttcacatttgtcactcatttttctcatttgctcttcccaagctttcctacaagtcgtaattgacattttaaattaggatcaactcactttagactccaatttacactaaccccaaatttagcttttcaaaccctcaaaaatctcacacttttccactcacatcgctaccattctcacatttaaccctaggttaactctccccatcatctctaccagttttctaccaacaatttcagcacacaaacatcaaaaagcatcatcataaaaccctaaaacagaatgggaagcgttactcacattaaacatgtcaagtttagtatgctttcaacaaattccttcacaaataactaccataagtcataaacctagtagaactacccatcatatctcccaaaatcccaatacccacgaaattcatgtgagaagaagtccacccatacctaaaattcgaagtcccacaacgtagatgtgcgcttcacgactccgaaaatggcttccctttgcaatttggagtagaaatgatgagcaatgtttggagctttaatgggcaacaatggtgaaggagaaagggagaagaaaagcaacgtgggagatgaggaaaaagcttctgaaaatctgctgagtgaagagagagaatgtggctttttaataaaaaaataattttctttttcctattattttatttttttaaaagcacttgccacttgtcccatttttagtggaacaaaaaggggcccagtttttctcttgatgtgacttcatactcagccacaaggagagaaaaaatttgaccttttgaatgctaaaatcctacctcggtttgcatgccacttcgctggttcgagttcctcgtgtttctctgcaccc

SEQ ID NO: 15882 - DNA, 1072 bp, Glycine max
  Gm_smallRNAprecursor_8715
atttttgttggacgaaaatgtcaatatttttttattggaggaaaatgtcaatatttttttacctaaacgtcagtacgtttcattggaccaaaaatgttactaagttaccattattgaacgaaaatgttagcaattttttgttggacctaaatatcagtatgtttctatacgactaatttgttagacccaaaatttcgtttcatttaagagtaaaatataattttaggataaattttcgtcattttttattgttacaagcataacattataatagtcacttaaaaaatatattggcgatcataatttaaaacaaacatagtaataatgataatattgattatcaatcataatttatctatcacaataaaaattattcaaataaatattataccagtttaccaaaataaaacattgtaacaatatacaaatcattacaattttttccaaattaccataaaagataaatatatttcatatttcacttattcattgacaaatgtgtccctaaaagatgaaaatacaaaatttagtcattgaatgtcgcactttttacactttcggagactaaattttgtattttcatcttttagggacacatttgtcaatgaattacacattcaatgacaaaagtgtttatttacccattcatattcccagagagtgggagacgaagagtcaagaaaatattatatgacaaatatgttcttatattagcaattagagatgattatgttggtcatcatttcagtgacaaatctcgtccatacgtgctacgtaaactattttattaacattgacggaagaaagttaatgaccgcatatatttgtcgtacttcttatatgttcgaagactaaattttgtattttcatcttttagatatatatttatcagcaaattatacattcagaaacaaaaatgacttcttagttaaatttcactttgtacaaccaaatcatagttttatgataattttcttatacactctatataataaaaacacatttttattaaactagtgagtttaaaaaagaaaaaacagaatcacaattcctatttctgttatagtatgta

SEQ ID NO: 15883 - DNA, 1051 bp, Glycine max
  Gm_smallRNAprecursor_8716
atttaagatattttttggtgaatatatattttaaaatctgaattttatataataatatatttattttagtaaatatttattttgtataataatctgaattttaaaatttttaatttaactattttactaaatataattagtttgtttatgtttttagatttaattaaaaatgataaaattaaagcttttaacaatttatttatataagaacattatactacgtcattaataaaatatttaaacaatgacatttgtctaaggaaaaactaagatgaggatacattaggacaattatttctgctatgaccatgttgccggcaaagtccacatttttttctacttgctcgttcattttcgtcttcgtccatcttagtaggaatgcgagttgaaacgggacgaccctttgcagtcctctttctccttggatcaggaccccactgatctccttcatattcttgccacattgattcgtgtggcaataaaccaaaggagttgtcgtagatgtgcaaaatgtgttgtaaagtgaatatcatcggcacataggtcatgggatcaacattgacagatttacaggcagccatgacgtgagaacacggtaaatgtttagcctgaaattcaccacaatcacacttttgggattgtaacattactctaaacctttcaggtggtttgggtgtttcaagtggggattgagtctcggttataataaaagtgtgattgtgtctgtcgaattcatttacaatgtgtgtattagattcttgttgaccactattgattgcatcgaagacgacttcagaatactgtgagccggagttgatcattgcctgagtttgtcgacctctattagcaaagagttgtgcggtcttgaaataggtctcctcaaccaatgatgacaccggcaaatgtcttgtgtttttgaacatgaaattaacagactccgacaaattggtagtcatatgtccccaacgtttcccctcatcaaagcattgtacccatttttgtttgggtaattgatcaagccattcagctgcacttggcttattcgcacgat

SEQ ID NO: 15884 - DNA, 1167 bp, Glycine max
  Gm_smallRNAprecursor_8717
aataatatatttattttagtaaatatttattttgtataataatctgaattttaaaatttttaatttaactattttactaaatataattagtttgtttatgtttttagatttaattaaaaatgataaaattaaagcttttaacaatttatttatataagaacattatactacgtcattaataaaatatttaaacaatgacatttgtctaaggaaaaactaagatgaggatacattaggacaattatttctgctatgaccatgttgccggcaaagtccacatttttttctacttgctcgttcattttcgtcttcgtccatcttagtaggaatgcgagttgaaacgggacgaccctttgcagtcctctttctccttggatcaggaccccactgatctccttcatattcttgccacattgattcgtgtggcaataaaccaaaggagttgtcgtagatgtgcaaaatgtgttgtaaagtgaatatcatcggcacataggtcatgggatcaacattgacagatttacaggcagccatgacgtgagaacacggtaaatgtttagcctgaaattcaccacaatcacacttttgggattgtaacattactctaaacctttcaggtggtttgggtgtttcaagtggggattgagtctcggttataataaaagtgtgattgtgtctgtcgaattcatttacaatgtgtgtattagattcttgttgaccactattgattgcatcgaagacgacttcagaatactgtgagccggagttgatcattgcctgagtttgtcgacctctattagcaaagagttgtgcggtcttgaaataggtctcctcaaccaatgatgacaccggcaaatgtcttgtgtttttgaacatgaaattaacagactccgacaaattggtagtcatatgtccccaacgtttcccctcatcaaagcattgtacccatttttgtttgggtaattgatcaagccattcagctgcacttggcttattcgcacgatatccccaagatgttgccagtgcatcttctccgtgtatgcgtaccctgtaaatatttaatcaatgtattatgttataaaatttgattgaaagaaaattataacgaataaataaaatagattctcaccagccaacataagtggtttctttaaatgtttgcagtttgag

SEQ ID NO: 15885 - DNA, 1092 bp, Glycine max
  Gm_smallRNAprecursor_8718
ggacaattatttctgctatgaccatgttgccggcaaagtccacatttttttctacttgctcgttcattttcgtcttcgtccatcttagtaggaatgcgagttgaaacgggacgaccctttgcagtcctctttctccttggatcaggaccccactgatctccttcatattcttgccacattgattcgtgtggcaataaaccaaaggagttgtcgtagatgtgcaaaatgtgttgtaaagtgaatatcatcggcacataggtcatgggatcaacattgacagatttacaggcagccatgacgtgagaacacggtaaatgtttagcctgaaattcaccacaatcacacttttgggattgtaacattactctaaacctttcaggtggtttgggtgtttcaagtggggattgagtctcggttataataaaagtgtgattgtgtctgtcgaattcatttacaatgtgtgtattagattcttgttgaccactattgattgcatcgaagacgacttcagaatactgtgagccggagttgatcattgcctgagtttgtcgacctctattagcaaagagttgtgcggtcttgaaataggtctcctcaaccaatgatgacaccggcaaatgtcttgtgtttttgaacatgaaattaacagactccgacaaattggtagtcatatgtccccaacgtttcccctcatcaaagcattgtacccatttttgtttgggtaattgatcaagccattcagctgcacttggcttattcgcacgatatccccaagatgttgccagtgcatcttctccgtgtatgcgtaccctgtaaatatttaatcaatgtattatgttataaaatttgattgaaagaaaattataacgaataaataaaatagattctcaccagccaacataagtggtttctttaaatgtttgcagtttgagttaccacgaagaaagttttgtgcaatgtggcgcaggcaaaagaaatgggatgtgtcctggacccataagttacttgggttgttgtaggcacttataattgaggggtgtcggtctgaaataagagaaatgttaatttgcggagtaacatgtcttctcaaat

SEQ ID NO: 15886 - DNA, 1185 bp, Glycine max
  Gm_smallRNAprecursor_8719
tgtttgggtaattgatcaagccattcagctgcacttggcttattcgcacgatatccccaagatgttgccagtgcatcttctccgtgtatgcgtaccctgtaaatatttaatcaatgtattatgttataaaatttgattgaaagaaaattataacgaataaataaaatagattctcaccagccaacataagtggtttctttaaatgtttgcagtttgagttaccacgaagaaagttttgtgcaatgtggcgcaggcaaaagaaatgggatgtgtcctggacccataagttacttgggttgttgtaggcacttataattgaggggtgtcggtctgaaataagagaaatgttaatttgcggagtaacatgtcttctcaaattctttagaaaaaacccccaagctgaagttgtctccccttctacaatggcataggcaatcgggaagatatggttagctccatcttgtgcggtagctatcaacagtgtgccagtatactttccgtaaagccatgtaccatctacttgtacaatgggtttgcaatatgcaaaaccattaatgcatggaccaaatgaccaaaagacacgtttaaacaatcttttgcccggtactatttctcccccctcatacaaggattctgtttgagcagcgaccacagtcccgggaacacaagattgcaaagctccgaaaagttttggcagtttggcatatgattcttcccagtttccatgaatcatctccaatgctttttgctttgctaaccatgtcttcttgtaggatggggtataattcatgaacgttttgatctctgcaatcaatgtcttgatggagacagttgggtttgttttgacaattggttggatgatctgtgctatgacgtgtttgtcgagttggcgatgatcttgtctaagcatcggcacgagacaagtgtgatgacctctgatactcttgataatccatttgttatgcctctttgaattgcatgcgcccaagctccatgtacaaccattttcatgtaacttgcagacgaagtgtagccttctttggtcagagtaaattgttctgcaatcaaaatgatttctgatgttgtattctttgattgctcgaatacattgtgatttgtcatcgaaggtcatgccaacctcgagtacaccgactggtggttgtacattgtgttgctgatgaacaa

SEQ ID NO: 15887 - DNA, 1040 bp, Glycine max
  Gm_smallRNAprecursor_8720
tattcgcacgatatccccaagatgttgccagtgcatcttctccgtgtatgcgtaccctgtaaatatttaatcaatgtattatgttataaaatttgattgaaagaaaattataacgaataaataaaatagattctcaccagccaacataagtggtttctttaaatgtttgcagtttgagttaccacgaagaaagttttgtgcaatgtggcgcaggcaaaagaaatgggatgtgtcctggacccataagttacttgggttgttgtaggcacttataattgaggggtgtcggtctgaaataagagaaatgttaatttgcggagtaacatgtcttctcaaattctttagaaaaaacccccaagctgaagttgtctccccttctacaatggcataggcaatcgggaagatatggttagctccatcttgtgcggtagctatcaacagtgtgccagtatactttccgtaaagccatgtaccatctacttgtacaatgggtttgcaatatgcaaaaccattaatgcatggaccaaatgaccaaaagacacgtttaaacaatcttttgcccggtactatttctcccccctcatacaaggattctgtttgagcagcgaccacagtcccgggaacacaagattgcaaagctccgaaaagttttggcagtttggcatatgattcttcccagtttccatgaatcatctccaatgctttttgctttgctaaccatgtcttcttgtaggatggggtataattcatgaacgttttgatctctgcaatcaatgtcttgatggagacagttgggtttgttttgacaattggttggatgatctgtgctatgacgtgtttgtcgagttggcgatgatcttgtctaagcatcggcacgagacaagtgtgatgacctctgatactcttgataatccatttgttatgcctctttgaattgcatgcgcccaagctccatgtacaaccattttcatgtaacttgcagacgaagtgtagccttctttggtcagagtaaattgttctgcaatcaaaatgatttctga

SEQ ID NO: 15888 - DNA, 1080 bp, Glycine max
  Gm_smallRNAprecursor_8721
aggataggaataagggtaatattgctatttagaaattaaaaaagtgggatgtgagcttaaacaaaaaaggggtgtaaataacatggtcctgacattgttacaggaactattttgaagagttgatctttttttgttttgttttgtttctttgggtcaatgaactgaataaagagctaatgtttttttttcttttgtcaattgaggtgtatctaaatttcctttacacatctctctataaaaaatgatatccaactaggcaggaaagcaaaggaagactgaacaaatacaaactggatttggatacggcccacacatatacactgttgcaactgggtgcaccaattacgtaacccaactgcaacaaccctaaagaataatgtgggtccagaatcagtttccaagtaagttaaaaaagtgagtgctgctcgccgatgcacccagcactaaccacgaaaagataaacttgatccgtaaatcttttacaaatcaacttgatccttaagtcttttacggatcaagttgatccgtaagttgatttttaagacttacggatcaagttgatctgtaagtcttttatggatcaagttgatccgtaagtcttaaaaattaacttacggatcaacttgatctataaggggagaaattaacaggaacagttttatcattttaaaagaatgttgagtgcatcagcaataatattgggtgcacctaacaacactctcaaaaaatccatcatacgagggtttaaaaatggttccaaaccataacatggtttttaacttttttcactgcgacatttaattccggggacccttctgtttagcaataattaagaaaacatgttggcatccctaaaatgaaaaccccaccaataatccatgcatagagaaatacaagatgaacaaaatgatgagttggtatactcgatttgggaacttggagacaaatcctttcatcttagtttttcacaagtttcgtcatgtaaaaattgtgtctactctttatattataaatattttcatatttcaatacgtccctaccgcaaattctcttatgttcgtgataaaatgataaaatcat

SEQ ID NO: 15889 - DNA, 1042 bp, Glycine max
  Gm_smallRNAprecursor_8722
aaaaagtgggatgtgagcttaaacaaaaaaggggtgtaaataacatggtcctgacattgttacaggaactattttgaagagttgatctttttttgttttgttttgtttctttgggtcaatgaactgaataaagagctaatgtttttttttcttttgtcaattgaggtgtatctaaatttcctttacacatctctctataaaaaatgatatccaactaggcaggaaagcaaaggaagactgaacaaatacaaactggatttggatacggcccacacatatacactgttgcaactgggtgcaccaattacgtaacccaactgcaacaaccctaaagaataatgtgggtccagaatcagtttccaagtaagttaaaaaagtgagtgctgctcgccgatgcacccagcactaaccacgaaaagataaacttgatccgtaaatcttttacaaatcaacttgatccttaagtcttttacggatcaagttgatccgtaagttgatttttaagacttacggatcaagttgatctgtaagtcttttatggatcaagttgatccgtaagtcttaaaaattaacttacggatcaacttgatctataaggggagaaattaacaggaacagttttatcattttaaaagaatgttgagtgcatcagcaataatattgggtgcacctaacaacactctcaaaaaatccatcatacgagggtttaaaaatggttccaaaccataacatggtttttaacttttttcactgcgacatttaattccggggacccttctgtttagcaataattaagaaaacatgttggcatccctaaaatgaaaaccccaccaataatccatgcatagagaaatacaagatgaacaaaatgatgagttggtatactcgatttgggaacttggagacaaatcctttcatcttagtttttcacaagtttcgtcatgtaaaaattgtgtctactctttatattataaatattttcatatttcaatacgtccctaccgcaaattctcttatgttcgtgataaaatgataaaatcat

SEQ ID NO: 15890 - DNA, 1125 bp, Glycine max
  Gm_smallRNAprecursor_8723
gccaatatcacctcaagtctaaaagaaaagctggtgcctcttcttagagaattcaaagactgttttgcttgggattaccacgaaatgcctgggttaagcagagaaatggtcgaaatgaaattaccgattaaggagggaaaaagaccagtaaagcaactaccaaggagattcgcgccagaaatcatgtctaaaattaaggaagagatcgaaaggctgctgaagtgtaaattcatcagatccgccaggtatgtcgaatggttagcaaatatagtccctgtcattaaaaagaatggaactcttagagtatgcatagattttagggatttaaataatgctacacctaaagatgaatatgctatgccagtagcggaaatgttggtagattcggcagctggcttcgaatttttaagcatgttagatggttattctggttataaccaaatatttattgctgaaagtgatgtgtcgaaaacagcatttcgatgccctggtgctttaggcacttatgaatgggtggttatgccctttgggttgaaaaatgctggggccacttatcaaagggccatgaattctatgtttcatgattttattgacacatttatgcaagtttatattgatgatataatcatcaaatcctcttcagaagatagccatttggattaccttaggcaatctttcgaacgaatgaggaaacatggattaaaaatgaatccattaaaatgtgctttttgtgtgcgtgcaggagatttccttggttttgtggtgcataaaaaaggcattgagataaatcaaaataagacaaaggctattcttgagacgaagcctccttcgaccaaaaaacagcttcagtctttgctaggaaaaatcaacttcttgaggcgattcatttcgaatctaagtggcaaagctcaaattttttcgccattactttgactcaagaaagatgaaccattcaaatggaatgaagagcatcaaaaggctttcgatgaaattaaagaatatctgatcaagcctcctgtgttaatgcctcctagtcgaaacaagtctatgaagttgtatattgctgcgtctgacaagaccattggtagcatgttggctcaggaagatgatgatggcatagaacat

SEQ ID NO: 15891 - DNA, 1045 bp, Glycine max
  Gm_smallRNAprecursor_8724
tgtattttgtggagattaaactcatattttctcttacaaactcaattaatagatgaccaatatgtaaaaaagattacgaatattttaattaggaaatattttatatatttttgtaataattcagaaagatatcttaaaaaacaagaattaaaattttttggaatttctatcttcataaagttaccttttagcaaaagattttttgttgaacaatggctaatatgttaaaaaagatcccgtatacaataaaaaaaacattaattggtatgattagatcccgattctaaaacaattataaaccgatttgacatgttagccttacatacaatccaattgaattctttccttggactgtgcccggaaactcaggtaatacttaactccaaattaataatatttttgaaattatttctatgcttgcttttacttaggggtgggaataggtcaggtcaggctttaaaaggtctgagtctagcctatgattaatttttgagatctgagtctggcctatagtctatcaaagacttttattttggctcggctgacctttttaaaagcctagcctgatttggtagctatttaaaaacctatttaaaaatcttcttcacattaaatctttaatattcctagttgtttttaccaaaaaaataaaataatataccttctataataggctaaacaaggccttaatatataatttgccttaatttttaatctaacgttaatttagttggtgatcctaaaaatatattaataatataaacagagatcaccaaatgatataaaataatctaaaacaaaaaaaacctcatacttgaggtagtatcatccaagtctatcaaaccaacatattaattattacaataaaaaaaataaagcctacatctccattctatttgaacagaatcagtgcataaaatatctaccaataaaattaatagtaacgtcatttcatcattagctcatccatatccaccataagataggatatgatttttgtatagaaacgtaataggatatgatatgatatgatttttgtatagga

SEQ ID NO: 15892 - DNA, 1037 bp, Glycine max
  Gm_smallRNAprecursor_8725
ctgcctaaataattataaaactataacagataaaataaattcacacaactaggaactaaagtacatgtgaccgtggtgaaataaaatatattctgcatctgttttgaattttcataaaaatcttgattttgagtaacagaagaatggtcacactaaaggttcaaaacccaagttttggtatcaacttgattagtaccgcaagtcatgataattctttttgttgctatttatatgttaggcaaagatgctaaacgaatgcttggtgtagatactgttgttgtcagtgaaatttccggacaagagagaggaggcagtaaagctggttgcaatttttttggtgtgctagatcttagtattttagaatttggttctaaggatcagaattctaacagcttgtttggaatcattaaaaaatggatttaatttgatttgattaagaaaccaatttccaactcattttaaaaaaatgatttggatatgaagcacggacacttcagccctttgccgtgtccggtgtccgacacgcgtccgtgtcagtgtccgacaccgacacgacacccgtattacgttctatattttggacattacaggtgtccacgtgtccgtatccgtgttgtgtccggtgtccgtgtccgtgtcggtgcttcataaattggatttgcaacaaatttaaattttttttggaacatattacaaataaatttaaggtttaattactcatctgattcctatagttacaaaaactttcccttttagtcccgatacttgcaaacatcccattttagtccctatacataccattttaatcccttttagtcctcgccttagggactaaaaggggttaaaatgatttgtgtagagactaaaagggattaaaaatagtatgtgttgagactaaaatgggatgtttttaagtataggggctaaaagagaaagtttttgtaactatagggatcaaatgaatacaacaacaaagccttatctcactagataaggtcagctacatgaatcacacgacgtcattcggcacagttaaa

SEQ ID NO: 15893 - DNA, 1038 bp, Glycine max
  Gm_smallRNAprecursor_8726
ctgcctaaataattataaaactataacagataaaataaattcacacaactaggaactaaagtacatgtgaccgtggtgaaataaaatatattctgcatctgttttgaattttcataaaaatcttgattttgagtaacagaagaatggtcacactaaaggttcaaaacccaagttttggtatcaacttgattagtaccgcaagtcatgataattctttttgttgctatttatatgttaggcaaagatgctaaacgaatgcttggtgtagatactgttgttgtcagtgaaatttccggacaagagagaggaggcagtaaagctggttgcaatttttttggtgtgctagatcttagtattttagaatttggttctaaggatcagaattctaacagcttgtttggaatcattaaaaaatggatttaatttgatttgattaagaaaccaatttccaactcattttaaaaaaatgatttggatatgaagcacggacacttcagccctttgccgtgtccggtgtccgacacgcgtccgtgtcagtgtccgacaccgacacgacacccgtattacgttctatattttggacattacaggtgtccacgtgtccgtatccgtgttgtgtccggtgtccgtgtccgtgtcggtgcttcataaattggatttgcaacaaatttaaattttttttggaacatattacaaataaatttaaggtttaattactcatctgattcctatagttacaaaaactttcccttttagtcccgatacttgcaaacatcccattttagtccctatacataccattttaatcccttttagtcctcgccttagggactaaaaggggttaaaatgatttgtgtagagactaaaagggattaaaaatagtatgtgttgagactaaaatgggatgtttttaagtataggggctaaaagagaaagtttttgtaactatagggatcaaatgaatacaacaacaaagccttatctcactagataaggtcagctacatgaatcacacgacgtcattcggcacagttaaaa

SEQ ID NO: 15894 - DNA, 1039 bp, Glycine max
  Gm_smallRNAprecursor_8727
ctgcctaaataattataaaactataacagataaaataaattcacacaactaggaactaaagtacatgtgaccgtggtgaaataaaatatattctgcatctgttttgaattttcataaaaatcttgattttgagtaacagaagaatggtcacactaaaggttcaaaacccaagttttggtatcaacttgattagtaccgcaagtcatgataattctttttgttgctatttatatgttaggcaaagatgctaaacgaatgcttggtgtagatactgttgttgtcagtgaaatttccggacaagagagaggaggcagtaaagctggttgcaatttttttggtgtgctagatcttagtattttagaatttggttctaaggatcagaattctaacagcttgtttggaatcattaaaaaatggatttaatttgatttgattaagaaaccaatttccaactcattttaaaaaaatgatttggatatgaagcacggacacttcagccctttgccgtgtccggtgtccgacacgcgtccgtgtcagtgtccgacaccgacacgacacccgtattacgttctatattttggacattacaggtgtccacgtgtccgtatccgtgttgtgtccggtgtccgtgtccgtgtcggtgcttcataaattggatttgcaacaaatttaaattttttttggaacatattacaaataaatttaaggtttaattactcatctgattcctatagttacaaaaactttcccttttagtcccgatacttgcaaacatcccattttagtccctatacataccattttaatcccttttagtcctcgccttagggactaaaaggggttaaaatgatttgtgtagagactaaaagggattaaaaatagtatgtgttgagactaaaatgggatgtttttaagtataggggctaaaagagaaagtttttgtaactatagggatcaaatgaatacaacaacaaagccttatctcactagataaggtcagctacatgaatcacacgacgtcattcggcacagttaaaaa

SEQ ID NO: 15895 - DNA, 1035 bp, Glycine max
  Gm_smallRNAprecursor_8728
tgcctaaataattataaaactataacagataaaataaattcacacaactaggaactaaagtacatgtgaccgtggtgaaataaaatatattctgcatctgttttgaattttcataaaaatcttgattttgagtaacagaagaatggtcacactaaaggttcaaaacccaagttttggtatcaacttgattagtaccgcaagtcatgataattctttttgttgctatttatatgttaggcaaagatgctaaacgaatgcttggtgtagatactgttgttgtcagtgaaatttccggacaagagagaggaggcagtaaagctggttgcaatttttttggtgtgctagatcttagtattttagaatttggttctaaggatcagaattctaacagcttgtttggaatcattaaaaaatggatttaatttgatttgattaagaaaccaatttccaactcattttaaaaaaatgatttggatatgaagcacggacacttcagccctttgccgtgtccggtgtccgacacgcgtccgtgtcagtgtccgacaccgacacgacacccgtattacgttctatattttggacattacaggtgtccacgtgtccgtatccgtgttgtgtccggtgtccgtgtccgtgtcggtgcttcataaattggatttgcaacaaatttaaattttttttggaacatattacaaataaatttaaggtttaattactcatctgattcctatagttacaaaaactttcccttttagtcccgatacttgcaaacatcccattttagtccctatacataccattttaatcccttttagtcctcgccttagggactaaaaggggttaaaatgatttgtgtagagactaaaagggattaaaaatagtatgtgttgagactaaaatgggatgtttttaagtataggggctaaaagagaaagtttttgtaactatagggatcaaatgaatacaacaacaaagccttatctcactagataaggtcagctacatgaatcacacgacgtcattcggcacagttaa

SEQ ID NO: 15896 - DNA, 1035 bp, Glycine max; identical to SEQ ID NO: 15895
  Gm_smallRNAprecursor_8729

SEQ ID NO: 15897 - DNA, 1036 bp, Glycine max
  Gm_smallRNAprecursor_8730
tgcctaaataattataaaactataacagataaaataaattcacacaactaggaactaaagtacatgtgaccgtggtgaaataaaatatattctgcatctgttttgaattttcataaaaatcttgattttgagtaacagaagaatggtcacactaaaggttcaaaacccaagttttggtatcaacttgattagtaccgcaagtcatgataattctttttgttgctatttatatgttaggcaaagatgctaaacgaatgcttggtgtagatactgttgttgtcagtgaaatttccggacaagagagaggaggcagtaaagctggttgcaatttttttggtgtgctagatcttagtattttagaatttggttctaaggatcagaattctaacagcttgtttggaatcattaaaaaatggatttaatttgatttgattaagaaaccaatttccaactcattttaaaaaaatgatttggatatgaagcacggacacttcagccctttgccgtgtccggtgtccgacacgcgtccgtgtcagtgtccgacaccgacacgacacccgtattacgttctatattttggacattacaggtgtccacgtgtccgtatccgtgttgtgtccggtgtccgtgtccgtgtcggtgcttcataaattggatttgcaacaaatttaaattttttttggaacatattacaaataaatttaaggtttaattactcatctgattcctatagttacaaaaactttcccttttagtcccgatacttgcaaacatcccattttagtccctatacataccattttaatcccttttagtcctcgccttagggactaaaaggggttaaaatgatttgtgtagagactaaaagggattaaaaatagtatgtgttgagactaaaatgggatgtttttaagtataggggctaaaagagaaagtttttgtaactatagggatcaaatgaatacaacaacaaagccttatctcactagataaggtcagctacatgaatcacacgacgtcattcggcacagttaaa

SEQ ID NO: 15898 - DNA, 1037 bp, Glycine max
  Gm_smallRNAprecursor_8731
tgcctaaataattataaaactataacagataaaataaattcacacaactaggaactaaagtacatgtgaccgtggtgaaataaaatatattctgcatctgttttgaattttcataaaaatcttgattttgagtaacagaagaatggtcacactaaaggttcaaaacccaagttttggtatcaacttgattagtaccgcaagtcatgataattctttttgttgctatttatatgttaggcaaagatgctaaacgaatgcttggtgtagatactgttgttgtcagtgaaatttccggacaagagagaggaggcagtaaagctggttgcaatttttttggtgtgctagatcttagtattttagaatttggttctaaggatcagaattctaacagcttgtttggaatcattaaaaaatggatttaatttgatttgattaagaaaccaatttccaactcattttaaaaaaatgatttggatatgaagcacggacacttcagccctttgccgtgtccggtgtccgacacgcgtccgtgtcagtgtccgacaccgacacgacacccgtattacgttctatattttggacattacaggtgtccacgtgtccgtatccgtgttgtgtccggtgtccgtgtccgtgtcggtgcttcataaattggatttgcaacaaatttaaattttttttggaacatattacaaataaatttaaggtttaattactcatctgattcctatagttacaaaaactttcccttttagtcccgatacttgcaaacatcccattttagtccctatacataccattttaatcccttttagtcctcgccttagggactaaaaggggttaaaatgatttgtgtagagactaaaagggattaaaaatagtatgtgttgagactaaaatgggatgtttttaagtataggggctaaaagagaaagtttttgtaactatagggatcaaatgaatacaacaacaaagccttatctcactagataaggtcagctacatgaatcacacgacgtcattcggcacagttaaaa

SEQ ID NO: 15899 - DNA, 1034 bp, Glycine max
  Gm_smallRNAprecursor_8732
gcctaaataattataaaactataacagataaaataaattcacacaactaggaactaaagtacatgtgaccgtggtgaaataaaatatattctgcatctgttttgaattttcataaaaatcttgattttgagtaacagaagaatggtcacactaaaggttcaaaacccaagttttggtatcaacttgattagtaccgcaagtcatgataattctttttgttgctatttatatgttaggcaaagatgctaaacgaatgcttggtgtagatactgttgttgtcagtgaaatttccggacaagagagaggaggcagtaaagctggttgcaatttttttggtgtgctagatcttagtattttagaatttggttctaaggatcagaattctaacagcttgtttggaatcattaaaaaatggatttaatttgatttgattaagaaaccaatttccaactcattttaaaaaaatgatttggatatgaagcacggacacttcagccctttgccgtgtccggtgtccgacacgcgtccgtgtcagtgtccgacaccgacacgacacccgtattacgttctatattttggacattacaggtgtccacgtgtccgtatccgtgttgtgtccggtgtccgtgtccgtgtcggtgcttcataaattggatttgcaacaaatttaaattttttttggaacatattacaaataaatttaaggtttaattactcatctgattcctatagttacaaaaactttcccttttagtcccgatacttgcaaacatcccattttagtccctatacataccattttaatcccttttagtcctcgccttagggactaaaaggggttaaaatgatttgtgtagagactaaaagggattaaaaatagtatgtgttgagactaaaatgggatgtttttaagtataggggctaaaagagaaagtttttgtaactatagggatcaaatgaatacaacaacaaagccttatctcactagataaggtcagctacatgaatcacacgacgtcattcggcacagttaa

SEQ ID NO: 15900 - DNA, 1034 bp, Glycine max; identical to SEQ ID NO: 15899
  Gm_smallRNAprecursor_8733

SEQ ID NO: 15901 - DNA, 1035 bp, Glycine max
  Gm_smallRNAprecursor_8734
gcctaaataattataaaactataacagataaaataaattcacacaactaggaactaaagtacatgtgaccgtggtgaaataaaatatattctgcatctgttttgaattttcataaaaatcttgattttgagtaacagaagaatggtcacactaaaggttcaaaacccaagttttggtatcaacttgattagtaccgcaagtcatgataattctttttgttgctatttatatgttaggcaaagatgctaaacgaatgcttggtgtagatactgttgttgtcagtgaaatttccggacaagagagaggaggcagtaaagctggttgcaatttttttggtgtgctagatcttagtattttagaatttggttctaaggatcagaattctaacagcttgtttggaatcattaaaaaatggatttaatttgatttgattaagaaaccaatttccaactcattttaaaaaaatgatttggatatgaagcacggacacttcagccctttgccgtgtccggtgtccgacacgcgtccgtgtcagtgtccgacaccgacacgacacccgtattacgttctatattttggacattacaggtgtccacgtgtccgtatccgtgttgtgtccggtgtccgtgtccgtgtcggtgcttcataaattggatttgcaacaaatttaaattttttttggaacatattacaaataaatttaaggtttaattactcatctgattcctatagttacaaaaactttcccttttagtcccgatacttgcaaacatcccattttagtccctatacataccattttaatcccttttagtcctcgccttagggactaaaaggggttaaaatgatttgtgtagagactaaaagggattaaaaatagtatgtgttgagactaaaatgggatgtttttaagtataggggctaaaagagaaagtttttgtaactatagggatcaaatgaatacaacaacaaagccttatctcactagataaggtcagctacatgaatcacacgacgtcattcggcacagttaaa

SEQ ID NO: 15902 - DNA, 1089 bp, Glycine max
  Gm_smallRNAprecursor_8735
gcctaaataattataaaactataacagataaaataaattcacacaactaggaactaaagtacatgtgaccgtggtgaaataaaatatattctgcatctgttttgaattttcataaaaatcttgattttgagtaacagaagaatggtcacactaaaggttcaaaacccaagttttggtatcaacttgattagtaccgcaagtcatgataattctttttgttgctatttatatgttaggcaaagatgctaaacgaatgcttggtgtagatactgttgttgtcagtgaaatttccggacaagagagaggaggcagtaaagctggttgcaatttttttggtgtgctagatcttagtattttagaatttggttctaaggatcagaattctaacagcttgtttggaatcattaaaaaatggatttaatttgatttgattaagaaaccaatttccaactcattttaaaaaaatgatttggatatgaagcacggacacttcagccctttgccgtgtccggtgtccgacacgcgtccgtgtcagtgtccgacaccgacacgacacccgtattacgttctatattttggacattacaggtgtccacgtgtccgtatccgtgttgtgtccggtgtccgtgtccgtgtcggtgcttcataaattggatttgcaacaaatttaaattttttttggaacatattacaaataaatttaaggtttaattactcatctgattcctatagttacaaaaactttcccttttagtcccgatacttgcaaacatcccattttagtccctatacataccattttaatcccttttagtcctcgccttagggactaaaaggggttaaaatgatttgtgtagagactaaaagggattaaaaatagtatgtgttgagactaaaatgggatgtttttaagtataggggctaaaagagaaagtttttgtaactatagggatcaaatgaatacaacaacaaagccttatctcactagataaggtcagctacatgaatcacacgacgtcattcggcacagttaaaaatcaaattttcagaaatattattaagtctcatttaatgaaacctaaatttaaa

SEQ ID NO: 15903 - DNA, 1114 bp, Glycine max
  Gm_smallRNAprecursor_8736
gcctaaataattataaaactataacagataaaataaattcacacaactaggaactaaagtacatgtgaccgtggtgaaataaaatatattctgcatctgttttgaattttcataaaaatcttgattttgagtaacagaagaatggtcacactaaaggttcaaaacccaagttttggtatcaacttgattagtaccgcaagtcatgataattctttttgttgctatttatatgttaggcaaagatgctaaacgaatgcttggtgtagatactgttgttgtcagtgaaatttccggacaagagagaggaggcagtaaagctggttgcaatttttttggtgtgctagatcttagtattttagaatttggttctaaggatcagaattctaacagcttgtttggaatcattaaaaaatggatttaatttgatttgattaagaaaccaatttccaactcattttaaaaaaatgatttggatatgaagcacggacacttcagccctttgccgtgtccggtgtccgacacgcgtccgtgtcagtgtccgacaccgacacgacacccgtattacgttctatattttggacattacaggtgtccacgtgtccgtatccgtgttgtgtccggtgtccgtgtccgtgtcggtgcttcataaattggatttgcaacaaatttaaattttttttggaacatattacaaataaatttaaggtttaattactcatctgattcctatagttacaaaaactttcccttttagtcccgatacttgcaaacatcccattttagtccctatacataccattttaatcccttttagtcctcgccttagggactaaaaggggttaaaatgatttgtgtagagactaaaagggattaaaaatagtatgtgttgagactaaaatgggatgtttttaagtataggggctaaaagagaaagtttttgtaactatagggatcaaatgaatacaacaacaaagccttatctcactagataaggtcagctacatgaatcacacgacgtcattcggcacagttaaaaatcaaattttcagaaatattattaagtctcatttaatgaaacctaaatttaaaacacataagtttaaaacaagagtta

SEQ ID NO: 15904 - DNA, 1033 bp, Glycine max
  Gm_smallRNAprecursor_8737
ataattataaaactataacagataaaataaattcacacaactaggaactaaagtacatgtgaccgtggtgaaataaaatatattctgcatctgttttgaattttcataaaaatcttgattttgagtaacagaagaatggtcacactaaaggttcaaaacccaagttttggtatcaacttgattagtaccgcaagtcatgataattctttttgttgctatttatatgttaggcaaagatgctaaacgaatgcttggtgtagatactgttgttgtcagtgaaatttccggacaagagagaggaggcagtaaagctggttgcaatttttttggtgtgctagatcttagtattttagaatttggttctaaggatcagaattctaacagcttgtttggaatcattaaaaaatggatttaatttgatttgattaagaaaccaatttccaactcattttaaaaaaatgatttggatatgaagcacggacacttcagccctttgccgtgtccggtgtccgacacgcgtccgtgtcagtgtccgacaccgacacgacacccgtattacgttctatattttggacattacaggtgtccacgtgtccgtatccgtgttgtgtccggtgtccgtgtccgtgtcggtgcttcataaattggatttgcaacaaatttaaattttttttggaacatattacaaataaatttaaggtttaattactcatctgattcctatagttacaaaaactttcccttttagtcccgatacttgcaaacatcccattttagtccctatacataccattttaatcccttttagtcctcgccttagggactaaaaggggttaaaatgatttgtgtagagactaaaagggattaaaaatagtatgtgttgagactaaaatgggatgtttttaagtataggggctaaaagagaaagtttttgtaactatagggatcaaatgaatacaacaacaaagccttatctcactagataaggtcagctacatgaatcacacgacgtcattcggcacagttaaaaatc

SEQ ID NO: 15905 - DNA, 1108 bp, Glycine max
  Gm_smallRNAprecursor_8738
ataattataaaactataacagataaaataaattcacacaactaggaactaaagtacatgtgaccgtggtgaaataaaatatattctgcatctgttttgaattttcataaaaatcttgattttgagtaacagaagaatggtcacactaaaggttcaaaacccaagttttggtatcaacttgattagtaccgcaagtcatgataattctttttgttgctatttatatgttaggcaaagatgctaaacgaatgcttggtgtagatactgttgttgtcagtgaaatttccggacaagagagaggaggcagtaaagctggttgcaatttttttggtgtgctagatcttagtattttagaatttggttctaaggatcagaattctaacagcttgtttggaatcattaaaaaatggatttaatttgatttgattaagaaaccaatttccaactcattttaaaaaaatgatttggatatgaagcacggacacttcagccctttgccgtgtccggtgtccgacacgcgtccgtgtcagtgtccgacaccgacacgacacccgtattacgttctatattttggacattacaggtgtccacgtgtccgtatccgtgttgtgtccggtgtccgtgtccgtgtcggtgcttcataaattggatttgcaacaaatttaaattttttttggaacatattacaaataaatttaaggtttaattactcatctgattcctatagttacaaaaactttcccttttagtcccgatacttgcaaacatcccattttagtccctatacataccattttaatcccttttagtcctcgccttagggactaaaaggggttaaaatgatttgtgtagagactaaaagggattaaaaatagtatgtgttgagactaaaatgggatgtttttaagtataggggctaaaagagaaagtttttgtaactatagggatcaaatgaatacaacaacaaagccttatctcactagataaggtcagctacatgaatcacacgacgtcattcggcacagttaaaaatcaaattttcagaaatattattaagtctcatttaatgaaacctaaatttaaaacacataagtttaaaacaagagtta

SEQ ID NO: 15906 - DNA, 1032 bp, Glycine max
  Gm_smallRNAprecursor_8739
taattataaaactataacagataaaataaattcacacaactaggaactaaagtacatgtgaccgtggtgaaataaaatatattctgcatctgttttgaattttcataaaaatcttgattttgagtaacagaagaatggtcacactaaaggttcaaaacccaagttttggtatcaacttgattagtaccgcaagtcatgataattctttttgttgctatttatatgttaggcaaagatgctaaacgaatgcttggtgtagatactgttgttgtcagtgaaatttccggacaagagagaggaggcagtaaagctggttgcaatttttttggtgtgctagatcttagtattttagaatttggttctaaggatcagaattctaacagcttgtttggaatcattaaaaaatggatttaatttgatttgattaagaaaccaatttccaactcattttaaaaaaatgatttggatatgaagcacggacacttcagccctttgccgtgtccggtgtccgacacgcgtccgtgtcagtgtccgacaccgacacgacacccgtattacgttctatattttggacattacaggtgtccacgtgtccgtatccgtgttgtgtccggtgtccgtgtccgtgtcggtgcttcataaattggatttgcaacaaatttaaattttttttggaacatattacaaataaatttaaggtttaattactcatctgattcctatagttacaaaaactttcccttttagtcccgatacttgcaaacatcccattttagtccctatacataccattttaatcccttttagtcctcgccttagggactaaaaggggttaaaatgatttgtgtagagactaaaagggattaaaaatagtatgtgttgagactaaaatgggatgtttttaagtataggggctaaaagagaaagtttttgtaactatagggatcaaatgaatacaacaacaaagccttatctcactagataaggtcagctacatgaatcacacgacgtcattcggcacagttaaaaatc

SEQ ID NO: 15907 - DNA, 1082 bp, Glycine max
  Gm_smallRNAprecursor_8740
taattataaaactataacagataaaataaattcacacaactaggaactaaagtacatgtgaccgtggtgaaataaaatatattctgcatctgttttgaattttcataaaaatcttgattttgagtaacagaagaatggtcacactaaaggttcaaaacccaagttttggtatcaacttgattagtaccgcaagtcatgataattctttttgttgctatttatatgttaggcaaagatgctaaacgaatgcttggtgtagatactgttgttgtcagtgaaatttccggacaagagagaggaggcagtaaagctggttgcaatttttttggtgtgctagatcttagtattttagaatttggttctaaggatcagaattctaacagcttgtttggaatcattaaaaaatggatttaatttgatttgattaagaaaccaatttccaactcattttaaaaaaatgatttggatatgaagcacggacacttcagccctttgccgtgtccggtgtccgacacgcgtccgtgtcagtgtccgacaccgacacgacacccgtattacgttctatattttggacattacaggtgtccacgtgtccgtatccgtgttgtgtccggtgtccgtgtccgtgtcggtgcttcataaattggatttgcaacaaatttaaattttttttggaacatattacaaataaatttaaggtttaattactcatctgattcctatagttacaaaaactttcccttttagtcccgatacttgcaaacatcccattttagtccctatacataccattttaatcccttttagtcctcgccttagggactaaaaggggttaaaatgatttgtgtagagactaaaagggattaaaaatagtatgtgttgagactaaaatgggatgtttttaagtataggggctaaaagagaaagtttttgtaactatagggatcaaatgaatacaacaacaaagccttatctcactagataaggtcagctacatgaatcacacgacgtcattcggcacagttaaaaatcaaattttcagaaatattattaagtctcatttaatgaaacctaaatttaaa

SEQ ID NO: 15908 - DNA, 1107 bp, Glycine max
  Gm_smallRNAprecursor_8741
taattataaaactataacagataaaataaattcacacaactaggaactaaagtacatgtgaccgtggtgaaataaaatatattctgcatctgttttgaattttcataaaaatcttgattttgagtaacagaagaatggtcacactaaaggttcaaaacccaagttttggtatcaacttgattagtaccgcaagtcatgataattctttttgttgctatttatatgttaggcaaagatgctaaacgaatgcttggtgtagatactgttgttgtcagtgaaatttccggacaagagagaggaggcagtaaagctggttgcaatttttttggtgtgctagatcttagtattttagaatttggttctaaggatcagaattctaacagcttgtttggaatcattaaaaaatggatttaatttgatttgattaagaaaccaatttccaactcattttaaaaaaatgatttggatatgaagcacggacacttcagccctttgccgtgtccggtgtccgacacgcgtccgtgtcagtgtccgacaccgacacgacacccgtattacgttctatattttggacattacaggtgtccacgtgtccgtatccgtgttgtgtccggtgtccgtgtccgtgtcggtgcttcataaattggatttgcaacaaatttaaattttttttggaacatattacaaataaatttaaggtttaattactcatctgattcctatagttacaaaaactttcccttttagtcccgatacttgcaaacatcccattttagtccctatacataccattttaatcccttttagtcctcgccttagggactaaaaggggttaaaatgatttgtgtagagactaaaagggattaaaaatagtatgtgttgagactaaaatgggatgtttttaagtataggggctaaaagagaaagtttttgtaactatagggatcaaatgaatacaacaacaaagccttatctcactagataaggtcagctacatgaatcacacgacgtcattcggcacagttaaaaatcaaattttcagaaatattattaagtctcatttaatgaaacctaaatttaaaacacataagtttaaaacaagagtta

SEQ ID NO: 15909 - DNA, 1081 bp, Glycine max
  Gm_smallRNAprecursor_8742
taaattcacacaactaggaactaaagtacatgtgaccgtggtgaaataaaatatattctgcatctgttttgaattttcataaaaatcttgattttgagtaacagaagaatggtcacactaaaggttcaaaacccaagttttggtatcaacttgattagtaccgcaagtcatgataattctttttgttgctatttatatgttaggcaaagatgctaaacgaatgcttggtgtagatactgttgttgtcagtgaaatttccggacaagagagaggaggcagtaaagctggttgcaatttttttggtgtgctagatcttagtattttagaatttggttctaaggatcagaattctaacagcttgtttggaatcattaaaaaatggatttaatttgatttgattaagaaaccaatttccaactcattttaaaaaaatgatttggatatgaagcacggacacttcagccctttgccgtgtccggtgtccgacacgcgtccgtgtcagtgtccgacaccgacacgacacccgtattacgttctatattttggacattacaggtgtccacgtgtccgtatccgtgttgtgtccggtgtccgtgtccgtgtcggtgcttcataaattggatttgcaacaaatttaaattttttttggaacatattacaaataaatttaaggtttaattactcatctgattcctatagttacaaaaactttcccttttagtcccgatacttgcaaacatcccattttagtccctatacataccattttaatcccttttagtcctcgccttagggactaaaaggggttaaaatgatttgtgtagagactaaaagggattaaaaatagtatgtgttgagactaaaatgggatgtttttaagtataggggctaaaagagaaagtttttgtaactatagggatcaaatgaatacaacaacaaagccttatctcactagataaggtcagctacatgaatcacacgacgtcattcggcacagttaaaaatcaaattttcagaaatattattaagtctcatttaatgaaacctaaatttaaaacacataagtttaaaacaagagtta

SEQ ID NO: 15910 - DNA, 1046 bp, Glycine max
  Gm_smallRNAprecursor_8743
aggtatgtcgaatggttagcaaatatagtccctgtcattaaaaagaatggaactcttagagtatgcatagattttagggatttaaataatgctacacctaaagatgaatatgctatgccagtagcagaaatgttggtagattcagcagctggcttcgaatttttaagcatgttagatggttattctggttataaccaaatatttattgctgaaagtgatgtgtcaaaaacagcatttcgatgccctggtgctttaggcacttatgaatgggtagttatgccctttgggttgaaaaatgctggggccacttatcaaagggccatgaattccatgtttcatgattttattgacacatttatgcaagtttatattgatgatataatcatcaaatcctcctcagaagatagccatttggattaccttaggcaatctttcgaacgaatgaggaaacatggattaaaaatgaatccattaaagtgtgctttttgtgtgcatgcaggagatttccttggttttgtggtgcataaaaaaggcattgagataaatcaaaacaagacaaaggctattcttgagacgaagcctccttcgaccaaaaaacagcttcagtctttgctaggaaaaatcaacttcttgaggcgattcatctcgaatctaagtggcaaagctcaaactttttcgccattacttcgactcaagaaagatgaaccattcaaatgggatgaagtgcatcaaaaggctttcgatgaaattaaagaatatctgatcaagcctcctgtgttaatgcctcctagtcgaaacaagactatgaagttgtatattgctgcgtctgacaagaccattggtagcatgttggctcaggaagatgatgatggcatagagcatgcaatttattatcttagtcgtgtactaaatgatgcagaaactagatatactgccatagaaaaactttgtctttgtttgtatttctcttgtgcaaaacttaagcaatatataaagcctgttgatgtttatgtatattctcattatgatattattaagcacatgtt

SEQ ID NO: 15911 - DNA, 1200 bp, Glycine max
  Gm_smallRNAprecursor_8744
tctcatttatgcataatttgataaaaatacaaacagtaagtgctatgtcaattaccagctaactagtagaaagaataaccatttctgatcaaactgatagcatctcgctgcattgtttaaactcctgtaccccatccaaaaatagcaatgcactaacaatagttttgatttggggacaaaaatgcaaggggctaacaatgtaccaactatgcatctacttgactttggcagaatggccatggtattgcaagattcaactctactctaagatacactaatgaaaaatcacaagttacaatgcacaaaactggtcaactttagtatgatctgcattggcaccctcttcatcagcatactgcatattagagcatgatctgcatttagcatgaattatggggcctaactgtgacctatccacgcctgctgttgttgttgttaagaatagtcccacatcgggtaattcatgaacatgataagtgattatatagctgggtagaccacccccttatgaaccggtttttaaggggacctttcggatgccttggctgcactataaaatttaatatggtatcagagccatattctgcttctgtccggtgggtgccgccagccctggctcgagggggcgtgttaagaatagtctcacatcgggtaattcgtgaacatgataagtgcttatatagctgggtagaccacccccttatgaaccggtttttaaggggtcctcttcagctggcactgcaacctcttcatgatctttcctttcttcataatctatggtttctgttgccaaaaaatgtggaactgtttcagttcccaattcctctgcaccactaagccacagcttgacactcacaaatcacttacgagagggcttctgcttatggcttttagacatccgattcttagtcacatgcaaatccatatggctactgtgttcctcttggcttctgaatcggagcccacaagttttgcattgtctagggagatcaccatacaaggcattcactgcagactcatgacaaaccttcagaatatctggattaaactcagtcccaacagaatcctaaaaacaaatacttaattaactcttgaatggcacaatcaactcaaccaaggataaaaagaaatgaacttatgattgctattaacattagatacctgttgatagcaactcagagacgagacccaaaaggaaaa

SEQ ID NO: 15912 - DNA, 1192 bp, Glycine max
  Gm_smallRNAprecursor_8745
atttatgcataatttgataaaaatacaaacagtaagtgctatgtcaattaccagctaactagtagaaagaataaccatttctgatcaaactgatagcatctcgctgcattgtttaaactcctgtaccccatccaaaaatagcaatgcactaacaatagttttgatttggggacaaaaatgcaaggggctaacaatgtaccaactatgcatctacttgactttggcagaatggccatggtattgcaagattcaactctactctaagatacactaatgaaaaatcacaagttacaatgcacaaaactggtcaactttagtatgatctgcattggcaccctcttcatcagcatactgcatattagagcatgatctgcatttagcatgaattatggggcctaactgtgacctatccacgcctgctgttgttgttgttaagaatagtcccacatcgggtaattcatgaacatgataagtgattatatagctgggtagaccacccccttatgaaccggtttttaaggggacctttcggatgccttggctgcactataaaatttaatatggtatcagagccatattctgcttctgtccggtgggtgccgccagccctggctcgagggggcgtgttaagaatagtctcacatcgggtaattcgtgaacatgataagtgcttatatagctgggtagaccacccccttatgaaccggtttttaaggggtcctcttcagctggcactgcaacctcttcatgatctttcctttcttcataatctatggtttctgttgccaaaaaatgtggaactgtttcagttcccaattcctctgcaccactaagccacagcttgacactcacaaatcacttacgagagggcttctgcttatggcttttagacatccgattcttagtcacatgcaaatccatatggctactgtgttcctcttggcttctgaatcggagcccacaagttttgcattgtctagggagatcaccatacaaggcattcactgcagactcatgacaaaccttcagaatatctggattaaactcagtcccaacagaatcctaaaaacaaatacttaattaactcttgaatggcacaatcaactcaaccaaggataaaaagaaatgaacttatgattgctattaacattagatacctgttgatagcaactcagagacgagacccaaaagg

SEQ ID NO: 15913 - DNA, 1097 bp, Glycine max
  Gm_smallRNAprecursor_8746
gaaggttttagtaactaaaaagggggatcaatttagttgggtgaacaataatgcatgaattgttataaattttctgagttttttattttattttcatgaataaaaaaataactaaaatatatatcacttatataatattgaaggctaatttaagaacttactcaatattgaagagacataaatgttagaaattaaatgataaacataagatgaaagtatgtcttaaatctgtaggcattaatcaagttatgtgtgttgctttccaaacaaaatcacttttcacgcaatttaccatgcatataaccaaaatttatcctttttaaacagcataattttgacaagaatgctagcaatcgaaaaatcaaaagctacctctcaagataacaaaataaattttcagttgatagcaaaggaggagaagattaactaattacctcaagaagtttccctcaggaagatgatgcatgttgtggatggagaaaattttaaaggcgatggagaattcctaagggatcgcatgatccaagtcagtgaaccggtaaaatatggctcaaaagcagaactgcaagcaaatgcatgcaggaagatcaagaattagatcaatgcgatccctttggaactctccaccaacaataaggttgttgttgttcatacaaagagcttgctattggacgagttgtatatatggtgctccaaaaacataactgtgggctcctttatgatgctaaataaaaagtaaaataaaggtgggtcttttcatgccttccatcgtgttgctagcttgtttcaattctcacatgcacttggactcacctcaaatgaaggtgccaaacaaaatgcttacttgctttgtgaaattactcaagtgcctttaataattatttacctataccataagcattttttttttaccaaatgttataccagaaacatattctcctttatatactgccttttctaacctatttatagttacataaaagttacataaatacacttgaatatatagaagtaggtttaatttcacgcatggttaatgtaaaaattattatagtcttaattaattatagaaattcttttaagtataattcttaaag

SEQ ID NO: 15914 - DNA, 1098 bp, Glycine max
  Gm_smallRNAprecursor_8747
gaaggttttagtaactaaaaagggggatcaatttagttgggtgaacaataatgcatgaattgttataaattttctgagttttttattttattttcatgaataaaaaaataactaaaatatatatcacttatataatattgaaggctaatttaagaacttactcaatattgaagagacataaatgttagaaattaaatgataaacataagatgaaagtatgtcttaaatctgtaggcattaatcaagttatgtgtgttgctttccaaacaaaatcacttttcacgcaatttaccatgcatataaccaaaatttatcctttttaaacagcataattttgacaagaatgctagcaatcgaaaaatcaaaagctacctctcaagataacaaaataaattttcagttgatagcaaaggaggagaagattaactaattacctcaagaagtttccctcaggaagatgatgcatgttgtggatggagaaaattttaaaggcgatggagaattcctaagggatcgcatgatccaagtcagtgaaccggtaaaatatggctcaaaagcagaactgcaagcaaatgcatgcaggaagatcaagaattagatcaatgcgatccctttggaactctccaccaacaataaggttgttgttgttcatacaaagagcttgctattggacgagttgtatatatggtgctccaaaaacataactgtgggctcctttatgatgctaaataaaaagtaaaataaaggtgggtcttttcatgccttccatcgtgttgctagcttgtttcaattctcacatgcacttggactcacctcaaatgaaggtgccaaacaaaatgcttacttgctttgtgaaattactcaagtgcctttaataattatttacctataccataagcattttttttttaccaaatgttataccagaaacatattctcctttatatactgccttttctaacctatttatagttacataaaagttacataaatacacttgaatatatagaagtaggtttaatttcacgcatggttaatgtaaaaattattatagtcttaattaattatagaaattcttttaagtataattcttaaagt

SEQ ID NO: 15915 - DNA, 1098 bp, Glycine max; identical to SEQ ID NO: 15914
  Gm_smallRNAprecursor_8748

SEQ ID NO: 15916 - DNA, 1081 bp, Glycine max
  Gm_smallRNAprecursor_8749
accagcgacaggtaattttttacacagttcgtgtttaattagtgctgaaaaatgttttttcttgctataaaaatataacagctaattttgatatatgcacttttataataaaatcttttttaaaaataaatgtttaagttgttcatccaatcaaattaagatttatagtatagtaggagaattaatatcgcattaaagtaacaaaccttgtatttttctatcgcccaactctttgatctagtaaatccactattttttttctaagcactgtaaatacttttatgttaatgatactttatttaatgagaaggtaaaattgtatttttggtctctcaatttgtttccaatttcgattttgatcttcctttaaaattattgacgaattttatcattatattttatctaatcacgtaattttggtcgcccaagtcaggattgaacgttgactatgaatgttgattgttgattgtcatatgtcacgttcttattaaatgatgactgtcacgtgtcatgttctgattggatgtcgaattattgttgttgtcattggtcgatcagaacatgacacgtaatagtcatcattcaataagaacgtgacacgtgacagtcaatattcatttgtaacaatcaacgttcaattttggattgagggatcaagattgtgtgattggataaaatagaaggacaaaattcgtcaataattttaaagaaaaactaaaatcgaaattgaagacaaattgaaggacaaaaaatatacaaaggagttatcgagtaatatataagcaaaattaaatgagcaaagtatgctttatttgaatttatttcttgtttcgggccattccaaaactggacctaatatgctagatgggctggaccttcttgattgaccttcttcagatccaacatgactttccgctgcagaaggttttaatcattactagtattacaaccccacatggttgggaaaggttatggtggttattatcttgtccataaaaataattgacatagtaaaaacaaagaaatttctaataatgaagtccaatagacaagtcagatcttaggcactcatacatttatt

SEQ ID NO: 15917 - DNA, 1061 bp, Glycine max
  Gm_smallRNAprecursor_8750
gggagtatggtcatcaagttaaagaaaccgaaatgcaagatagatactaaccaaaattgtgaataatgtttttgaatcttatatacaaaattaacaaatctgcagctcagaaaattattaggtacataattttgttttctataatgatagaaagcatgtacaaattgcattaacattttgctttcatatcttattaaaaccctaagaattgaaccaggacaccatcagatcaacgaaatttaagaacactttatttcaacacacacacacatgtatagtaatataattcactttcttataccagcttcctgggaaaactgacagataactttcaagtttcaacaaaaaaaaaattatgaactcaaatatatatcaataaggatattaattagaatcttaccttgcagacatgaaagtctatcaagaactacagaccattttttttctgtggatgaagatctctctatattggaaagaagcccgtgaatcgtctattgctgatgcagcatcatcaagattctcagcacctaaacactcccccaaggaggtggaatctgtgtgtgaatcttgatgctgctgcacctgcaaacaacgactatatacaaatcctagtagctgctgcaatttcctttcttagcttgagctatgatcgaattgattcagtgaaaagaacaagattaccatgaaccctcaaccatggtgccttgctatatatacgacagatatatataacagaatataagtgaacaacttagggaaccctaacagaatatacggttcctacaggctgcagattcaatatatacacacacgcacgcacaaagagagagagatttaaaaaggatttgaagagtagcaaagcagtactagtaaactataaaaagagggaaaatatataatctagggaaggggaagcaagcaattaaaatacacaaacagattaaattaaagctgaacaacctttaattggtggagattaatcatgggttttgtgtgtttctattttttggtggtgatttggtgtatacatggttacatgttcatattgtatatgcgtgtgt

SEQ ID NO: 15918 - DNA, 1058 bp, Glycine max
  Gm_smallRNAprecursor_8751
ggagtatggtcatcaagttaaagaaaccgaaatgcaagatagatactaaccaaaattgtgaataatgtttttgaatcttatatacaaaattaacaaatctgcagctcagaaaattattaggtacataattttgttttctataatgatagaaagcatgtacaaattgcattaacattttgctttcatatcttattaaaaccctaagaattgaaccaggacaccatcagatcaacgaaatttaagaacactttatttcaacacacacacacatgtatagtaatataattcactttcttataccagcttcctgggaaaactgacagataactttcaagtttcaacaaaaaaaaaattatgaactcaaatatatatcaataaggatattaattagaatcttaccttgcagacatgaaagtctatcaagaactacagaccattttttttctgtggatgaagatctctctatattggaaagaagcccgtgaatcgtctattgctgatgcagcatcatcaagattctcagcacctaaacactcccccaaggaggtggaatctgtgtgtgaatcttgatgctgctgcacctgcaaacaacgactatatacaaatcctagtagctgctgcaatttcctttcttagcttgagctatgatcgaattgattcagtgaaaagaacaagattaccatgaaccctcaaccatggtgccttgctatatatacgacagatatatataacagaatataagtgaacaacttagggaaccctaacagaatatacggttcctacaggctgcagattcaatatatacacacacgcacgcacaaagagagagagatttaaaaaggatttgaagagtagcaaagcagtactagtaaactataaaaagagggaaaatatataatctagggaaggggaagcaagcaattaaaatacacaaacagattaaattaaagctgaacaacctttaattggtggagattaatcatgggttttgtgtgtttctattttttggtggtgatttggtgtatacatggttacatgttcatattgtatatgcgtgt

SEQ ID NO: 15919 - DNA, 1185 bp, Glycine max
  Gm_smallRNAprecursor_8752
cttggaggtaatattaccctgttctcgtatattgatatggtaattttattccaaaccaagtgcaacttgttatttacaattggatcataggaacattgcgcttgagtgttattgagcattgaaccctttgtgaattgagttagtccataactttgggcgaagtttggcaaattgtcctaatgggactcattttagaaagtattttttataatgggtttgtttcaaaacaatatacaacatggatctgctattttacataaaatacatgcaaattgtcaatattactgacgagaagcccctgcgtgcaacatgtggcaaaaacgtcactgccactgacggaatagcaagtggtctcactatttgtgttggcgatatagccatgcatggttccgccaggttgactgacgatacagctgatacacgtgacaacaggtgtatttcgccattacgaatgacgaaatatttttgtacggaaaattttttgaacttaaaacggttgtaacttttgataagaatgtccgtctgagacccataatatgtcaaaatgttcgaaattaaatgaggaatcccctggcaaaaatcttaaatcctatttttggaaaaatgagttgactaaatcccctttggatatttgttaggggattcctcatttaattttgagcattttaacatattatgggcctcaaacggacattcctatcaaaagttacaaccgtttcaagtttaaaaaattttccgtacaaaaatatttcgccattcgcaatggcgaaatatagtgtgtctgctgccacgtatactagctgtatcgccagtcaatctagcggaaccctgcatagctatatcgccagcacaaacagcgagaccattcgctattctgccagtggcagtggcattttcgccacgtgttgcacataggggcttctcgctagtaacattagcggtttgcatgtattttacgtaaaataatagacccatattgtaaattgttttgaaacagacctattgtgagaaatagtttctaaaagaagccccattaaggtaatttgcgggcgaagttcacccactaaccggattggactttgagcctattccagggtaattttcttaatgacgtaacttgcatttaagcatttcactttggaaaaaattactcacatgacatgagatgagtatatatgcctattc

SEQ ID NO: 15920 - DNA, 1185 bp, Glycine max; identical to SEQ ID NO: 15919
  Gm_smallRNAprecursor_8753

SEQ ID NO: 15921 - DNA, 1068 bp, Glycine max
  Gm_smallRNAprecursor_8754
cgtggaattggaattgaagggtttgggtttttagggttcttatacgatgagtaaaaggaggaagatggttctgatccaaaaaaaaaaacactgggttgtgcatatgatatggtagaacaagcaaaagttaaaggtaaagatgatgatgaagctgaccactttgctttatgcttttttgcctttgaggttatacataaatttccatgggtatagaatatcagataaatgcagatttttatttgccaaaggtcatgtcttttatttaccatactattcggtccatcgtgtttaattttaaggttaaagataggtaaaattgcaaatttggtcccctagtttatctctagtttcggatttggtcccttagtaatttaattcacgaatttggtcatcctattttgtaaaatcgtgcaatgttggtcccccatgccacaattaaacgttgaccgttaacaagtgatgttgactgtcacgtgtcatgttcttatttgattatgattgtcatgtgtcatgttctgattggatgtcaactccatgaaagatgaaatgcattgttgttttcattgaccaatcagaacatgacacatgacagttatcatctaataagaacgtgacacatgacagtcaacatcactttgttaatggtcaacgtccatttgtggtctgggggaccaacattgcactattttataaaataggaggactaaattcgtgaattaaattattgggggaccaaatccaaaaataaacataaactgggggaacaaaaatacaattttaccgctaaagatatggcttgttgctcatgtaagttcaattgttcaaagggaagattgaaccagataagctatataaaagatatggcttgttacgcttgtagctcatgaatgttcaagtgttcaattaatcttatattaggtgtacagtccttaaaaattatgttaagaagaatggaatgaaataaaatgaaatagaaaaaaaatgttcattagtttatatgttatggtgaaaatgaacaaaatcttattgtttgggttataatcttaattttaaaatttagtgtgtaag

SEQ ID NO: 15922 - DNA, 1069 bp, Glycine max
  Gm_smallRNAprecursor_8755
tcatgttctactgcttgttgctaagatattccagttttgtgtcagtttttcccggtgaacagtttgtgatagttttatcatctaaaatatgaatgtttatttcaatcaagaatcatggtttccattaattgtatgtcatcttttatttcaatcaaagatatggatgcttttacgttacatggactcactttgcttcgtaaatttgtattttttttgttttatcttttgaaaagttaatatttaataacgggggctatgtgcaccgtgcaccacttacttgtgcggcatcattattattagagtgttgttaggtgcacccagcattctttgaaaatggccaaattattcctgtcttctttctccctttatggatcaagttgattcgtaaaagactcacgatcaacttgatccataagtcttaaaaatcaacttacaaatcaacttgatctgtaagaagcttatggatcaagttgatttgtaaaagacttacggatcaacttaatccgtaagtcttaaaaatcaaaatcaacttgtggatcaagttaattcgcaagctttttacggatcaagttgatccgtaagtcacttgcggatcaacttgatccgtaagaagcttgcggatcaactaaaatctatgtggatcaaactcattgcatatgcggatcaacttgtgggtgcacaaaaacatttttaaaaatacacaagagtatttttgccttttcacattaagtgttgggtgtacctattaacaatttaacgataaatattaagtttttaaaaactagtcaatacttttaaggaatcaaagtaacatgataatttaaattgtacactaattctgttttaaagaaataaaaaaaattaaacggttttcattaaaataataaaaaaaatcaacacttagtttattcttaagttatccttttacaagaaaaatataaaatgtatttggtcaataaaagcatttgattatctcaaattatcaaggtagaggatagggttaaattataattttaatcctcttttaattcttaatttttaattttactccgtttatctttcttttgtg

SEQ ID NO: 15923 - DNA, 1068 bp, Glycine max
  Gm_smallRNAprecursor_8756
catgttctactgcttgttgctaagatattccagttttgtgtcagtttttcccggtgaacagtttgtgatagttttatcatctaaaatatgaatgtttatttcaatcaagaatcatggtttccattaattgtatgtcatcttttatttcaatcaaagatatggatgcttttacgttacatggactcactttgcttcgtaaatttgtattttttttgttttatcttttgaaaagttaatatttaataacgggggctatgtgcaccgtgcaccacttacttgtgcggcatcattattattagagtgttgttaggtgcacccagcattctttgaaaatggccaaattattcctgtcttctttctccctttatggatcaagttgattcgtaaaagactcacgatcaacttgatccataagtcttaaaaatcaacttacaaatcaacttgatctgtaagaagcttatggatcaagttgatttgtaaaagacttacggatcaacttaatccgtaagtcttaaaaatcaaaatcaacttgtggatcaagttaattcgcaagctttttacggatcaagttgatccgtaagtcacttgcggatcaacttgatccgtaagaagcttgcggatcaactaaaatctatgtggatcaaactcattgcatatgcggatcaacttgtgggtgcacaaaaacatttttaaaaatacacaagagtatttttgccttttcacattaagtgttgggtgtacctattaacaatttaacgataaatattaagtttttaaaaactagtcaatacttttaaggaatcaaagtaacatgataatttaaattgtacactaattctgttttaaagaaataaaaaaaattaaacggttttcattaaaataataaaaaaaatcaacacttagtttattcttaagttatccttttacaagaaaaatataaaatgtatttggtcaataaaagcatttgattatctcaaattatcaaggtagaggatagggttaaattataattttaatcctcttttaattcttaatttttaattttactccgtttatctttcttttgtg

SEQ ID NO: 15924 - DNA, 1126 bp, Glycine max
  Gm_smallRNAprecursor_8757
ttaagattaacaccaaatttattctggtaaaaaaccttaagaatgaagtaatcctaggaatacccttcattagagccctgtttcccatccaaatatctaatgaaggaataaccacaaattatttaggaagaaaaattatatttaatttttctactaaaccaatttccaaaaatataaatcttatagaaaataagattaatcaaattaacttcttaaaagaagaagtatcttttaataatattcagatacaactgggaaaaccccaagtaaaagaaaaaattcaatctttattaaatcatattgaatcgactgtctgttctgatttgccacatgcattttgggatagaaagaaacatattgttgatctcccttatgagaaagactttaggggaaaaaattcccacaaaagctagactaatccaaatgaacgaagaacttcttcaatactgccaaaaggaaatcaaggatttgcttgataaaggcctaatccggaaaagcaaaagcccatggtcttgtgcggctttttatgtcaacaaacaatctgagattgaacgtggaacaccccgcttagtcataaattacaaaccactaaatcaagcattacaatggattagatatcctattccaaacaaaaaagatttgcttaacagattaaattttgcaaagatattttcaaaatttgatatgaaatctggattttggcaaatccaaatccaagaatcagataggtacaaaacaacgtttactgtacctttcgggcaatatgaatggaatgtgatgccattcggactgaagaatgccccttcaaaatttcaaaaaattatgaatgatatttttaatccctattcaaaatttgtcattgtctacatagacgatgttttaatcttttcccaatacattgaccaacatttcaaacatctccagaccttcatccatatcatcaaacagaatggtttggcaatctccaaattaaaaatcaatcttttccaaactcgaattcgattccttggtcacaatatatatcaaggtacaatcattccaatagaaaggtcaattgagtttgctagcaaatttcccaaccaaaccttagacaaaacccagttacaaagatttctaggttgtctaa

SEQ ID NO: 15925 - DNA, 1168 bp, Glycine max
  Gm_smallRNAprecursor_8758
atggtcttgtgcggctttttatgtcaacaaacaatctgagattgaacgtggaacaccccgcttagtcataaattacaaaccactaaatcaagcattacaatggattagatatcctattccaaacaaaaaagatttgcttaacagattaaattttgcaaagatattttcaaaatttgatatgaaatctggattttggcaaatccaaatccaagaatcagataggtacaaaacaacgtttactgtacctttcgggcaatatgaatggaatgtgatgccattcggactgaagaatgccccttcaaaatttcaaaaaattatgaatgatatttttaatccctattcaaaatttgtcattgtctacatagacgatgttttaatcttttcccaatacattgaccaacatttcaaacatctccagaccttcatccatatcatcaaacagaatggtttggcaatctccaaattaaaaatcaatcttttccaaactcgaattcgattccttggtcacaatatatatcaaggtacaatcattccaatagaaaggtcaattgagtttgctagcaaatttcccaaccaaaccttagacaaaacccagttacaaagatttctaggttgtctaaattacgtaggagaatttgtcccctatttaaacaatattgtcaagccattgcatgataggctgaagaaaattccacctccttggtctgacctccatacagaaacagttaaagaaatcaaagtcaaagttctatccataaaatgtctgtatcttcctattccacaaacatttaaaattgtcgaaactgatgcttcaaacataggttatggtggcatcctcaaacaaagagtccatggccaagatcatgtcattgcatatacatcaaaacattggaatcctgcacaattaaaatattcaactgttaaaaaggaagttttagcaattgttttgtgcatttccaaatttcaatcgaatttattaaaccaaaattttttaatcagagttgattgtaaatcagccaaagatattttacaaaaagatgttaaaaaccttgcctcaaaacaaatttttgcaagatggcaagcaattctaagtgtctttgattttgacatagaatacatcaagggcacctcaaattcattacctgacaaccttacccgtgaattctta

SEQ ID NO: 15926 - DNA, 1095 bp, Glycine max
  Gm_smallRNAprecursor_8759
tgaatggaatgtgatgccattcggactgaagaatgccccttcaaaatttcaaaaaattatgaatgatatttttaatccctattcaaaatttgtcattgtctacatagacgatgttttaatcttttcccaatacattgaccaacatttcaaacatctccagaccttcatccatatcatcaaacagaatggtttggcaatctccaaattaaaaatcaatcttttccaaactcgaattcgattccttggtcacaatatatatcaaggtacaatcattccaatagaaaggtcaattgagtttgctagcaaatttcccaaccaaaccttagacaaaacccagttacaaagatttctaggttgtctaaattacgtaggagaatttgtcccctatttaaacaatattgtcaagccattgcatgataggctgaagaaaattccacctccttggtctgacctccatacagaaacagttaaagaaatcaaagtcaaagttctatccataaaatgtctgtatcttcctattccacaaacatttaaaattgtcgaaactgatgcttcaaacataggttatggtggcatcctcaaacaaagagtccatggccaagatcatgtcattgcatatacatcaaaacattggaatcctgcacaattaaaatattcaactgttaaaaaggaagttttagcaattgttttgtgcatttccaaatttcaatcgaatttattaaaccaaaattttttaatcagagttgattgtaaatcagccaaagatattttacaaaaagatgttaaaaaccttgcctcaaaacaaatttttgcaagatggcaagcaattctaagtgtctttgattttgacatagaatacatcaagggcacctcaaattcattacctgacaaccttacccgtgaattcttacagaaaagtggtaatgcctcctaaggcatcaggaatctccctaaggggaggaagaagtacagtcaaaggagccagactggctcttccagagccaaccattaagaaatcatcaacctcttctaggtcaccaacccaggctgggtcatctacccagaaaaccaatttagaagggtcatcaacccaga

SEQ ID NO: 15927 - DNA, 1095 bp, Glycine max; identical to SEQ ID NO: 15926
  Gm_smallRNAprecursor_8760

SEQ ID NO: 15928 - DNA, 1095 bp, Glycine max; identical to SEQ ID NO: 15926
  Gm_smallRNAprecursor_8761

SEQ ID NO: 15929 - DNA, 1095 bp, Glycine max; identical to SEQ ID NO: 15926
  Gm_smallRNAprecursor_8762

SEQ ID NO: 15930 - DNA, 1166 bp, Glycine max
  Gm_smallRNAprecursor_8763
tgaatggaatgtgatgccattcggactgaagaatgccccttcaaaatttcaaaaaattatgaatgatatttttaatccctattcaaaatttgtcattgtctacatagacgatgttttaatcttttcccaatacattgaccaacatttcaaacatctccagaccttcatccatatcatcaaacagaatggtttggcaatctccaaattaaaaatcaatcttttccaaactcgaattcgattccttggtcacaatatatatcaaggtacaatcattccaatagaaaggtcaattgagtttgctagcaaatttcccaaccaaaccttagacaaaacccagttacaaagatttctaggttgtctaaattacgtaggagaatttgtcccctatttaaacaatattgtcaagccattgcatgataggctgaagaaaattccacctccttggtctgacctccatacagaaacagttaaagaaatcaaagtcaaagttctatccataaaatgtctgtatcttcctattccacaaacatttaaaattgtcgaaactgatgcttcaaacataggttatggtggcatcctcaaacaaagagtccatggccaagatcatgtcattgcatatacatcaaaacattggaatcctgcacaattaaaatattcaactgttaaaaaggaagttttagcaattgttttgtgcatttccaaatttcaatcgaatttattaaaccaaaattttttaatcagagttgattgtaaatcagccaaagatattttacaaaaagatgttaaaaaccttgcctcaaaacaaatttttgcaagatggcaagcaattctaagtgtctttgattttgacatagaatacatcaagggcacctcaaattcattacctgacaaccttacccgtgaattcttacagaaaagtggtaatgcctcctaaggcatcaggaatctccctaaggggaggaagaagtacagtcaaaggagccagactggctcttccagagccaaccattaagaaatcatcaacctcttctaggtcaccaacccaggctgggtcatctacccagaaaaccaatttagaagggtcatcaacccagattacctcaatcaaacttgagccatccactcaggaatcccccaaaccagcaaccgccaaacaaacatcggcc

SEQ ID NO: 15931 - DNA, 1166 bp, Glycine max; identical to SEQ ID NO: 15930
  Gm_smallRNAprecursor_8764

SEQ ID NO: 15932 - DNA, 1167 bp, Glycine max
  Gm_smallRNAprecursor_8765
tgaatggaatgtgatgccattcggactgaagaatgccccttcaaaatttcaaaaaattatgaatgatatttttaatccctattcaaaatttgtcattgtctacatagacgatgttttaatcttttcccaatacattgaccaacatttcaaacatctccagaccttcatccatatcatcaaacagaatggtttggcaatctccaaattaaaaatcaatcttttccaaactcgaattcgattccttggtcacaatatatatcaaggtacaatcattccaatagaaaggtcaattgagtttgctagcaaatttcccaaccaaaccttagacaaaacccagttacaaagatttctaggttgtctaaattacgtaggagaatttgtcccctatttaaacaatattgtcaagccattgcatgataggctgaagaaaattccacctccttggtctgacctccatacagaaacagttaaagaaatcaaagtcaaagttctatccataaaatgtctgtatcttcctattccacaaacatttaaaattgtcgaaactgatgcttcaaacataggttatggtggcatcctcaaacaaagagtccatggccaagatcatgtcattgcatatacatcaaaacattggaatcctgcacaattaaaatattcaactgttaaaaaggaagttttagcaattgttttgtgcatttccaaatttcaatcgaatttattaaaccaaaattttttaatcagagttgattgtaaatcagccaaagatattttacaaaaagatgttaaaaaccttgcctcaaaacaaatttttgcaagatggcaagcaattctaagtgtctttgattttgacatagaatacatcaagggcacctcaaattcattacctgacaaccttacccgtgaattcttacagaaaagtggtaatgcctcctaaggcatcaggaatctccctaaggggaggaagaagtacagtcaaaggagccagactggctcttccagagccaaccattaagaaatcatcaacctcttctaggtcaccaacccaggctgggtcatctacccagaaaaccaatttagaagggtcatcaacccagattacctcaatcaaacttgagccatccactcaggaatcccccaaaccagcaaccgccaaacaaacatcggccg

SEQ ID NO: 15933 - DNA, 1167 bp, Glycine max; identical to SEQ ID NO: 15932
  Gm_smallRNAprecursor_8766

SEQ ID NO: 15934 - DNA, 1035 bp, Glycine max
  Gm_smallRNAprecursor_8767
attgtctacatagacgatgttttaatcttttcccaatacattgaccaacatttcaaacatctccagaccttcatccatatcatcaaacagaatggtttggcaatctccaaattaaaaatcaatcttttccaaactcgaattcgattccttggtcacaatatatatcaaggtacaatcattccaatagaaaggtcaattgagtttgctagcaaatttcccaaccaaaccttagacaaaacccagttacaaagatttctaggttgtctaaattacgtaggagaatttgtcccctatttaaacaatattgtcaagccattgcatgataggctgaagaaaattccacctccttggtctgacctccatacagaaacagttaaagaaatcaaagtcaaagttctatccataaaatgtctgtatcttcctattccacaaacatttaaaattgtcgaaactgatgcttcaaacataggttatggtggcatcctcaaacaaagagtccatggccaagatcatgtcattgcatatacatcaaaacattggaatcctgcacaattaaaatattcaactgttaaaaaggaagttttagcaattgttttgtgcatttccaaatttcaatcgaatttattaaaccaaaattttttaatcagagttgattgtaaatcagccaaagatattttacaaaaagatgttaaaaaccttgcctcaaaacaaatttttgcaagatggcaagcaattctaagtgtctttgattttgacatagaatacatcaagggcacctcaaattcattacctgacaaccttacccgtgaattcttacagaaaagtggtaatgcctcctaaggcatcaggaatctccctaaggggaggaagaagtacagtcaaaggagccagactggctcttccagagccaaccattaagaaatcatcaacctcttctaggtcaccaacccaggctgggtcatctacccagaaaaccaatttagaagggtcatcaacccagattacctcaatcaaacttgagccatccactcagga

SEQ ID NO: 15935 - DNA, 1035 bp, Glycine max; identical to SEQ ID NO: 15934
  Gm_smallRNAprecursor_8768

SEQ ID NO: 15936 - DNA, 1037 bp, Glycine max
  Gm_smallRNAprecursor_8769
atacattgaccaacatttcaaacatctccagaccttcatccatatcatcaaacagaatggtttggcaatctccaaattaaaaatcaatcttttccaaactcgaattcgattccttggtcacaatatatatcaaggtacaatcattccaatagaaaggtcaattgagtttgctagcaaatttcccaaccaaaccttagacaaaacccagttacaaagatttctaggttgtctaaattacgtaggagaatttgtcccctatttaaacaatattgtcaagccattgcatgataggctgaagaaaattccacctccttggtctgacctccatacagaaacagttaaagaaatcaaagtcaaagttctatccataaaatgtctgtatcttcctattccacaaacatttaaaattgtcgaaactgatgcttcaaacataggttatggtggcatcctcaaacaaagagtccatggccaagatcatgtcattgcatatacatcaaaacattggaatcctgcacaattaaaatattcaactgttaaaaaggaagttttagcaattgttttgtgcatttccaaatttcaatcgaatttattaaaccaaaattttttaatcagagttgattgtaaatcagccaaagatattttacaaaaagatgttaaaaaccttgcctcaaaacaaatttttgcaagatggcaagcaattctaagtgtctttgattttgacatagaatacatcaagggcacctcaaattcattacctgacaaccttacccgtgaattcttacagaaaagtggtaatgcctcctaaggcatcaggaatctccctaaggggaggaagaagtacagtcaaaggagccagactggctcttccagagccaaccattaagaaatcatcaacctcttctaggtcaccaacccaggctgggtcatctacccagaaaaccaatttagaagggtcatcaacccagattacctcaatcaaacttgagccatccactcaggaatcccccaaaccagcaaccgccaaacaaacatcggcc

SEQ ID NO: 15937 - DNA, 1190 bp, Glycine max
  Gm_smallRNAprecursor_8770
acagtcaaaggagccagactggctcttccagagccaaccattaagaaatcatcaacctcttctaggtcaccaacccaggctgggtcatctacccagaaaaccaatttagaagggtcatcaacccagattacctcaatcaaacttgagccatccactcaggaatcccccaaaccagcaaccgccaaacaaacatcggccgactatgcatggccaattgaaacccttcaggcccttcaagacatgggtctaaccaaatttccaaaaataatcaaaaaatcttgggcagacattgcctcaaaatctaatgatgaatctaaatcaaatttacaaacaatgatccaaaatgcatcaatgaccaaaacagctaccgatcctaaaggggaactacctttagccaaaactcaaacaccacctaccaaacaaactaacaattatatttataaaaataaatttgaaattgttttgcagatggaacttgaattttgggacaaaaatcccttcaaggcgacgaccaaggctttcccaccaggatttcactacaaaccaaccaccatcctgaagacaataactttttatgaattgattttggtagattcaaattcaatatctatcaaacatttcaaagacccaaaagaccaaacattaaacacccactccacaatccaaatactaaaagttcttcaaccaagacactttggttcggacttgaacaaaggaaagagattttcagttccatttgatccggtaggttatacctattgtgattatgttgatgcttggactaaggtgttttggcaccaaaatacccgcttcaagcattcatggctgatatatttcaagaccaatacaatttacaattttcccaattggtttttgcaatggtgggacttctttggaccaattccagagatattcccagaaacagtccaacaagcatttgctcaatttgagagacaatacaattcgcaggaatcacgaattccagtagatcttaaatacttttcaagctttgcactgtcatggatcttctcatggcaatatcgttacagcaagactgaaaagacaaaccaatatccatcactacaaagacatgcatttgtaaaatggtggacacaatttgactcatccaaagcagattcagaacaagtaaaactctggctccaatcccatccagaattcctcaaagcagc

SEQ ID NO: 15938 - DNA, 1171 bp, Glycine max
  Gm_smallRNAprecursor_8771
ccccaaaccagcaaccgccaaacaaacatcggccgactatgcatggccaattgaaacccttcaggcccttcaagacatgggtctaaccaaatttccaaaaataatcaaaaaatcttgggcagacattgcctcaaaatctaatgatgaatctaaatcaaatttacaaacaatgatccaaaatgcatcaatgaccaaaacagctaccgatcctaaaggggaactacctttagccaaaactcaaacaccacctaccaaacaaactaacaattatatttataaaaataaatttgaaattgttttgcagatggaacttgaattttgggacaaaaatcccttcaaggcgacgaccaaggctttcccaccaggatttcactacaaaccaaccaccatcctgaagacaataactttttatgaattgattttggtagattcaaattcaatatctatcaaacatttcaaagacccaaaagaccaaacattaaacacccactccacaatccaaatactaaaagttcttcaaccaagacactttggttcggacttgaacaaaggaaagagattttcagttccatttgatccggtaggttatacctattgtgattatgttgatgcttggactaaggtgttttggcaccaaaatacccgcttcaagcattcatggctgatatatttcaagaccaatacaatttacaattttcccaattggtttttgcaatggtgggacttctttggaccaattccagagatattcccagaaacagtccaacaagcatttgctcaatttgagagacaatacaattcgcaggaatcacgaattccagtagatcttaaatacttttcaagctttgcactgtcatggatcttctcatggcaatatcgttacagcaagactgaaaagacaaaccaatatccatcactacaaagacatgcatttgtaaaatggtggacacaatttgactcatccaaagcagattcagaacaagtaaaactctggctccaatcccatccagaattcctcaaagcagctaatccagaaacttttgtgtttttgaaccaaaagtatcatctggcatcatttttagcaagattgaaatcaaaggaggtcctaactaaaaatttaaaaaaaagttctgcaaatgctacagcaggaagaagaaggttcatcctcaaa

SEQ ID NO: 15939 - DNA, 1166 bp, Glycine max
  Gm_smallRNAprecursor_8772
ccaaaccagcaaccgccaaacaaacatcggccgactatgcatggccaattgaaacccttcaggcccttcaagacatgggtctaaccaaatttccaaaaataatcaaaaaatcttgggcagacattgcctcaaaatctaatgatgaatctaaatcaaatttacaaacaatgatccaaaatgcatcaatgaccaaaacagctaccgatcctaaaggggaactacctttagccaaaactcaaacaccacctaccaaacaaactaacaattatatttataaaaataaatttgaaattgttttgcagatggaacttgaattttgggacaaaaatcccttcaaggcgacgaccaaggctttcccaccaggatttcactacaaaccaaccaccatcctgaagacaataactttttatgaattgattttggtagattcaaattcaatatctatcaaacatttcaaagacccaaaagaccaaacattaaacacccactccacaatccaaatactaaaagttcttcaaccaagacactttggttcggacttgaacaaaggaaagagattttcagttccatttgatccggtaggttatacctattgtgattatgttgatgcttggactaaggtgttttggcaccaaaatacccgcttcaagcattcatggctgatatatttcaagaccaatacaatttacaattttcccaattggtttttgcaatggtgggacttctttggaccaattccagagatattcccagaaacagtccaacaagcatttgctcaatttgagagacaatacaattcgcaggaatcacgaattccagtagatcttaaatacttttcaagctttgcactgtcatggatcttctcatggcaatatcgttacagcaagactgaaaagacaaaccaatatccatcactacaaagacatgcatttgtaaaatggtggacacaatttgactcatccaaagcagattcagaacaagtaaaactctggctccaatcccatccagaattcctcaaagcagctaatccagaaacttttgtgtttttgaaccaaaagtatcatctggcatcatttttagcaagattgaaatcaaaggaggtcctaactaaaaatttaaaaaaaagttctgcaaatgctacagcaggaagaagaaggttcatcctc

SEQ ID NO: 15940 - DNA, 1169 bp, Glycine max
  Gm_smallRNAprecursor_8773
ccaaaccagcaaccgccaaacaaacatcggccgactatgcatggccaattgaaacccttcaggcccttcaagacatgggtctaaccaaatttccaaaaataatcaaaaaatcttgggcagacattgcctcaaaatctaatgatgaatctaaatcaaatttacaaacaatgatccaaaatgcatcaatgaccaaaacagctaccgatcctaaaggggaactacctttagccaaaactcaaacaccacctaccaaacaaactaacaattatatttataaaaataaatttgaaattgttttgcagatggaacttgaattttgggacaaaaatcccttcaaggcgacgaccaaggctttcccaccaggatttcactacaaaccaaccaccatcctgaagacaataactttttatgaattgattttggtagattcaaattcaatatctatcaaacatttcaaagacccaaaagaccaaacattaaacacccactccacaatccaaatactaaaagttcttcaaccaagacactttggttcggacttgaacaaaggaaagagattttcagttccatttgatccggtaggttatacctattgtgattatgttgatgcttggactaaggtgttttggcaccaaaatacccgcttcaagcattcatggctgatatatttcaagaccaatacaatttacaattttcccaattggtttttgcaatggtgggacttctttggaccaattccagagatattcccagaaacagtccaacaagcatttgctcaatttgagagacaatacaattcgcaggaatcacgaattccagtagatcttaaatacttttcaagctttgcactgtcatggatcttctcatggcaatatcgttacagcaagactgaaaagacaaaccaatatccatcactacaaagacatgcatttgtaaaatggtggacacaatttgactcatccaaagcagattcagaacaagtaaaactctggctccaatcccatccagaattcctcaaagcagctaatccagaaacttttgtgtttttgaaccaaaagtatcatctggcatcatttttagcaagattgaaatcaaaggaggtcctaactaaaaatttaaaaaaaagttctgcaaatgctacagcaggaagaagaaggttcatcctcaaa

SEQ ID NO: 15941 - DNA, 1107 bp, Glycine max
  Gm_smallRNAprecursor_8774
aaccagcaaccgccaaacaaacatcggccgactatgcatggccaattgaaacccttcaggcccttcaagacatgggtctaaccaaatttccaaaaataatcaaaaaatcttgggcagacattgcctcaaaatctaatgatgaatctaaatcaaatttacaaacaatgatccaaaatgcatcaatgaccaaaacagctaccgatcctaaaggggaactacctttagccaaaactcaaacaccacctaccaaacaaactaacaattatatttataaaaataaatttgaaattgttttgcagatggaacttgaattttgggacaaaaatcccttcaaggcgacgaccaaggctttcccaccaggatttcactacaaaccaaccaccatcctgaagacaataactttttatgaattgattttggtagattcaaattcaatatctatcaaacatttcaaagacccaaaagaccaaacattaaacacccactccacaatccaaatactaaaagttcttcaaccaagacactttggttcggacttgaacaaaggaaagagattttcagttccatttgatccggtaggttatacctattgtgattatgttgatgcttggactaaggtgttttggcaccaaaatacccgcttcaagcattcatggctgatatatttcaagaccaatacaatttacaattttcccaattggtttttgcaatggtgggacttctttggaccaattccagagatattcccagaaacagtccaacaagcatttgctcaatttgagagacaatacaattcgcaggaatcacgaattccagtagatcttaaatacttttcaagctttgcactgtcatggatcttctcatggcaatatcgttacagcaagactgaaaagacaaaccaatatccatcactacaaagacatgcatttgtaaaatggtggacacaatttgactcatccaaagcagattcagaacaagtaaaactctggctccaatcccatccagaattcctcaaagcagctaatccagaaacttttgtgtttttgaaccaaaagtatcatctggcatcatttttagcaagattgaaatcaaaggaggtcctaacta

SEQ ID NO: 15942 - DNA, 1107 bp, Glycine max; identical to SEQ ID NO: 15941
  Gm_smallRNAprecursor_8775

SEQ ID NO: 15943 - DNA, 1108 bp, Glycine max
  Gm_smallRNAprecursor_8776
aaccagcaaccgccaaacaaacatcggccgactatgcatggccaattgaaacccttcaggcccttcaagacatgggtctaaccaaatttccaaaaataatcaaaaaatcttgggcagacattgcctcaaaatctaatgatgaatctaaatcaaatttacaaacaatgatccaaaatgcatcaatgaccaaaacagctaccgatcctaaaggggaactacctttagccaaaactcaaacaccacctaccaaacaaactaacaattatatttataaaaataaatttgaaattgttttgcagatggaacttgaattttgggacaaaaatcccttcaaggcgacgaccaaggctttcccaccaggatttcactacaaaccaaccaccatcctgaagacaataactttttatgaattgattttggtagattcaaattcaatatctatcaaacatttcaaagacccaaaagaccaaacattaaacacccactccacaatccaaatactaaaagttcttcaaccaagacactttggttcggacttgaacaaaggaaagagattttcagttccatttgatccggtaggttatacctattgtgattatgttgatgcttggactaaggtgttttggcaccaaaatacccgcttcaagcattcatggctgatatatttcaagaccaatacaatttacaattttcccaattggtttttgcaatggtgggacttctttggaccaattccagagatattcccagaaacagtccaacaagcatttgctcaatttgagagacaatacaattcgcaggaatcacgaattccagtagatcttaaatacttttcaagctttgcactgtcatggatcttctcatggcaatatcgttacagcaagactgaaaagacaaaccaatatccatcactacaaagacatgcatttgtaaaatggtggacacaatttgactcatccaaagcagattcagaacaagtaaaactctggctccaatcccatccagaattcctcaaagcagctaatccagaaacttttgtgtttttgaaccaaaagtatcatctggcatcatttttagcaagattgaaatcaaaggaggtcctaactaa

SEQ ID NO: 15944 - DNA, 1108 bp, Glycine max; identical to SEQ ID NO: 15943
  Gm_smallRNAprecursor_8777

SEQ ID NO: 15945 - DNA, 1102 bp, Glycine max
  Gm_smallRNAprecursor_8778
cagcaaccgccaaacaaacatcggccgactatgcatggccaattgaaacccttcaggcccttcaagacatgggtctaaccaaatttccaaaaataatcaaaaaatcttgggcagacattgcctcaaaatctaatgatgaatctaaatcaaatttacaaacaatgatccaaaatgcatcaatgaccaaaacagctaccgatcctaaaggggaactacctttagccaaaactcaaacaccacctaccaaacaaactaacaattatatttataaaaataaatttgaaattgttttgcagatggaacttgaattttgggacaaaaatcccttcaaggcgacgaccaaggctttcccaccaggatttcactacaaaccaaccaccatcctgaagacaataactttttatgaattgattttggtagattcaaattcaatatctatcaaacatttcaaagacccaaaagaccaaacattaaacacccactccacaatccaaatactaaaagttcttcaaccaagacactttggttcggacttgaacaaaggaaagagattttcagttccatttgatccggtaggttatacctattgtgattatgttgatgcttggactaaggtgttttggcaccaaaatacccgcttcaagcattcatggctgatatatttcaagaccaatacaatttacaattttcccaattggtttttgcaatggtgggacttctttggaccaattccagagatattcccagaaacagtccaacaagcatttgctcaatttgagagacaatacaattcgcaggaatcacgaattccagtagatcttaaatacttttcaagctttgcactgtcatggatcttctcatggcaatatcgttacagcaagactgaaaagacaaaccaatatccatcactacaaagacatgcatttgtaaaatggtggacacaatttgactcatccaaagcagattcagaacaagtaaaactctggctccaatcccatccagaattcctcaaagcagctaatccagaaacttttgtgtttttgaaccaaaagtatcatctggcatcatttttagcaagattgaaatcaaaggaggtcctaac

SEQ ID NO: 15946 - DNA, 1098 bp, Glycine max
  Gm_smallRNAprecursor_8779
caagacatgggtctaaccaaatttccaaaaataatcaaaaaatcttgggcagacattgcctcaaaatctaatgatgaatctaaatcaaatttacaaacaatgatccaaaatgcatcaatgaccaaaacagctaccgatcctaaaggggaactacctttagccaaaactcaaacaccacctaccaaacaaactaacaattatatttataaaaataaatttgaaattgttttgcagatggaacttgaattttgggacaaaaatcccttcaaggcgacgaccaaggctttcccaccaggatttcactacaaaccaaccaccatcctgaagacaataactttttatgaattgattttggtagattcaaattcaatatctatcaaacatttcaaagacccaaaagaccaaacattaaacacccactccacaatccaaatactaaaagttcttcaaccaagacactttggttcggacttgaacaaaggaaagagattttcagttccatttgatccggtaggttatacctattgtgattatgttgatgcttggactaaggtgttttggcaccaaaatacccgcttcaagcattcatggctgatatatttcaagaccaatacaatttacaattttcccaattggtttttgcaatggtgggacttctttggaccaattccagagatattcccagaaacagtccaacaagcatttgctcaatttgagagacaatacaattcgcaggaatcacgaattccagtagatcttaaatacttttcaagctttgcactgtcatggatcttctcatggcaatatcgttacagcaagactgaaaagacaaaccaatatccatcactacaaagacatgcatttgtaaaatggtggacacaatttgactcatccaaagcagattcagaacaagtaaaactctggctccaatcccatccagaattcctcaaagcagctaatccagaaacttttgtgtttttgaaccaaaagtatcatctggcatcatttttagcaagattgaaatcaaaggaggtcctaactaaaaatttaaaaaaaagttctgcaaatgctacagcaggaagaagaaggttcatcctc

SEQ ID NO: 15947 - DNA, 1099 bp, Glycine max
  Gm_smallRNAprecursor_8780
caagacatgggtctaaccaaatttccaaaaataatcaaaaaatcttgggcagacattgcctcaaaatctaatgatgaatctaaatcaaatttacaaacaatgatccaaaatgcatcaatgaccaaaacagctaccgatcctaaaggggaactacctttagccaaaactcaaacaccacctaccaaacaaactaacaattatatttataaaaataaatttgaaattgttttgcagatggaacttgaattttgggacaaaaatcccttcaaggcgacgaccaaggctttcccaccaggatttcactacaaaccaaccaccatcctgaagacaataactttttatgaattgattttggtagattcaaattcaatatctatcaaacatttcaaagacccaaaagaccaaacattaaacacccactccacaatccaaatactaaaagttcttcaaccaagacactttggttcggacttgaacaaaggaaagagattttcagttccatttgatccggtaggttatacctattgtgattatgttgatgcttggactaaggtgttttggcaccaaaatacccgcttcaagcattcatggctgatatatttcaagaccaatacaatttacaattttcccaattggtttttgcaatggtgggacttctttggaccaattccagagatattcccagaaacagtccaacaagcatttgctcaatttgagagacaatacaattcgcaggaatcacgaattccagtagatcttaaatacttttcaagctttgcactgtcatggatcttctcatggcaatatcgttacagcaagactgaaaagacaaaccaatatccatcactacaaagacatgcatttgtaaaatggtggacacaatttgactcatccaaagcagattcagaacaagtaaaactctggctccaatcccatccagaattcctcaaagcagctaatccagaaacttttgtgtttttgaaccaaaagtatcatctggcatcatttttagcaagattgaaatcaaaggaggtcctaactaaaaatttaaaaaaaagttctgcaaatgctacagcaggaagaagaaggttcatcctca

SEQ ID NO: 15948 - DNA, 1080 bp, Glycine max
  Gm_smallRNAprecursor_8781
gattcaaattcaatatctatcaaacatttcaaagacccaaaagaccaaacattaaacacccactccacaatccaaatactaaaagttcttcaaccaagacactttggttcggacttgaacaaaggaaagagattttcagttccatttgatccggtaggttatacctattgtgattatgttgatgcttggactaaggtgttttggcaccaaaatacccgcttcaagcattcatggctgatatatttcaagaccaatacaatttacaattttcccaattggtttttgcaatggtgggacttctttggaccaattccagagatattcccagaaacagtccaacaagcatttgctcaatttgagagacaatacaattcgcaggaatcacgaattccagtagatcttaaatacttttcaagctttgcactgtcatggatcttctcatggcaatatcgttacagcaagactgaaaagacaaaccaatatccatcactacaaagacatgcatttgtaaaatggtggacacaatttgactcatccaaagcagattcagaacaagtaaaactctggctccaatcccatccagaattcctcaaagcagctaatccagaaacttttgtgtttttgaaccaaaagtatcatctggcatcatttttagcaagattgaaatcaaaggaggtcctaactaaaaatttaaaaaaaagttctgcaaatgctacagcaggaagaagaaggttcatcctcaaagaaggaagaaacaagttctactaaagaagaagaacaagacccgttttaccaaaacgaagatgattgttttggtatctgtttagattaaatttaatttcggtcacaaaatcgtctgtttgtaattaatgtgtaattaatgctagacaatactacctgtcctgtagccattaaagtcccggtcaaacctacttatcttgtaacaaacagtcaaatagtcccggtcaaaactaccggcaactatcagtcttagatttttggctatataaggagtcctcatgtatgttgtgaggcaccctttcatttggccatttttcaggtttctgaagagaggtgctc

SEQ ID NO: 15949 - DNA, 1078 bp, Glycine max
  Gm_smallRNAprecursor_8782
attcaaattcaatatctatcaaacatttcaaagacccaaaagaccaaacattaaacacccactccacaatccaaatactaaaagttcttcaaccaagacactttggttcggacttgaacaaaggaaagagattttcagttccatttgatccggtaggttatacctattgtgattatgttgatgcttggactaaggtgttttggcaccaaaatacccgcttcaagcattcatggctgatatatttcaagaccaatacaatttacaattttcccaattggtttttgcaatggtgggacttctttggaccaattccagagatattcccagaaacagtccaacaagcatttgctcaatttgagagacaatacaattcgcaggaatcacgaattccagtagatcttaaatacttttcaagctttgcactgtcatggatcttctcatggcaatatcgttacagcaagactgaaaagacaaaccaatatccatcactacaaagacatgcatttgtaaaatggtggacacaatttgactcatccaaagcagattcagaacaagtaaaactctggctccaatcccatccagaattcctcaaagcagctaatccagaaacttttgtgtttttgaaccaaaagtatcatctggcatcatttttagcaagattgaaatcaaaggaggtcctaactaaaaatttaaaaaaaagttctgcaaatgctacagcaggaagaagaaggttcatcctcaaagaaggaagaaacaagttctactaaagaagaagaacaagacccgttttaccaaaacgaagatgattgttttggtatctgtttagattaaatttaatttcggtcacaaaatcgtctgtttgtaattaatgtgtaattaatgctagacaatactacctgtcctgtagccattaaagtcccggtcaaacctacttatcttgtaacaaacagtcaaatagtcccggtcaaaactaccggcaactatcagtcttagatttttggctatataaggagtcctcatgtatgttgtgaggcaccctttcatttggccatttttcaggtttctgaagagaggtgct

SEQ ID NO: 15950 - DNA, 1079 bp, Glycine max
  Gm_smallRNAprecursor_8783
attcaaattcaatatctatcaaacatttcaaagacccaaaagaccaaacattaaacacccactccacaatccaaatactaaaagttcttcaaccaagacactttggttcggacttgaacaaaggaaagagattttcagttccatttgatccggtaggttatacctattgtgattatgttgatgcttggactaaggtgttttggcaccaaaatacccgcttcaagcattcatggctgatatatttcaagaccaatacaatttacaattttcccaattggtttttgcaatggtgggacttctttggaccaattccagagatattcccagaaacagtccaacaagcatttgctcaatttgagagacaatacaattcgcaggaatcacgaattccagtagatcttaaatacttttcaagctttgcactgtcatggatcttctcatggcaatatcgttacagcaagactgaaaagacaaaccaatatccatcactacaaagacatgcatttgtaaaatggtggacacaatttgactcatccaaagcagattcagaacaagtaaaactctggctccaatcccatccagaattcctcaaagcagctaatccagaaacttttgtgtttttgaaccaaaagtatcatctggcatcatttttagcaagattgaaatcaaaggaggtcctaactaaaaatttaaaaaaaagttctgcaaatgctacagcaggaagaagaaggttcatcctcaaagaaggaagaaacaagttctactaaagaagaagaacaagacccgttttaccaaaacgaagatgattgttttggtatctgtttagattaaatttaatttcggtcacaaaatcgtctgtttgtaattaatgtgtaattaatgctagacaatactacctgtcctgtagccattaaagtcccggtcaaacctacttatcttgtaacaaacagtcaaatagtcccggtcaaaactaccggcaactatcagtcttagatttttggctatataaggagtcctcatgtatgttgtgaggcaccctttcatttggccatttttcaggtttctgaagagaggtgctc

SEQ ID NO: 15951 - DNA, 1155 bp, Glycine max
  Gm_smallRNAprecursor_8784
gggacttctttggaccaattccagagatattcccagaaacagtccaacaagcatttgctcaatttgagagacaatacaattcgcaggaatcacgaattccagtagatcttaaatacttttcaagctttgcactgtcatggatcttctcatggcaatatcgttacagcaagactgaaaagacaaaccaatatccatcactacaaagacatgcatttgtaaaatggtggacacaatttgactcatccaaagcagattcagaacaagtaaaactctggctccaatcccatccagaattcctcaaagcagctaatccagaaacttttgtgtttttgaaccaaaagtatcatctggcatcatttttagcaagattgaaatcaaaggaggtcctaactaaaaatttaaaaaaaagttctgcaaatgctacagcaggaagaagaaggttcatcctcaaagaaggaagaaacaagttctactaaagaagaagaacaagacccgttttaccaaaacgaagatgattgttttggtatctgtttagattaaatttaatttcggtcacaaaatcgtctgtttgtaattaatgtgtaattaatgctagacaatactacctgtcctgtagccattaaagtcccggtcaaacctacttatcttgtaacaaacagtcaaatagtcccggtcaaaactaccggcaactatcagtcttagatttttggctatataaggagtcctcatgtatgttgtgaggcaccctttcatttggccatttttcaggtttctgaagagaggtgctctgaaacaagatttttgtaagcgcttctttcaagtttcaataaatttctatttttatccctcttctctctctttaccgatccatgcggctctgccaccgctttggtttctttgtttatgaaaacctgggatttgtaagccggtctccggtgtgcccttgatatctgttttacaagtttatattttcatttccatttattatactgcattcttacttcatttccatacatatatatatatatatatatatatatatatatatatatatatatatatatatatatatatatattgtgaggtatgactaccttccgagcttgtgcttgttttatttaaattcctaggatcataagcaactaggtgtgtcct

SEQ ID NO: 15952 - DNA, 1142 bp, Glycine max
  Gm_smallRNAprecursor_8785
accaattccagagatattcccagaaacagtccaacaagcatttgctcaatttgagagacaatacaattcgcaggaatcacgaattccagtagatcttaaatacttttcaagctttgcactgtcatggatcttctcatggcaatatcgttacagcaagactgaaaagacaaaccaatatccatcactacaaagacatgcatttgtaaaatggtggacacaatttgactcatccaaagcagattcagaacaagtaaaactctggctccaatcccatccagaattcctcaaagcagctaatccagaaacttttgtgtttttgaaccaaaagtatcatctggcatcatttttagcaagattgaaatcaaaggaggtcctaactaaaaatttaaaaaaaagttctgcaaatgctacagcaggaagaagaaggttcatcctcaaagaaggaagaaacaagttctactaaagaagaagaacaagacccgttttaccaaaacgaagatgattgttttggtatctgtttagattaaatttaatttcggtcacaaaatcgtctgtttgtaattaatgtgtaattaatgctagacaatactacctgtcctgtagccattaaagtcccggtcaaacctacttatcttgtaacaaacagtcaaatagtcccggtcaaaactaccggcaactatcagtcttagatttttggctatataaggagtcctcatgtatgttgtgaggcaccctttcatttggccatttttcaggtttctgaagagaggtgctctgaaacaagatttttgtaagcgcttctttcaagtttcaataaatttctatttttatccctcttctctctctttaccgatccatgcggctctgccaccgctttggtttctttgtttatgaaaacctgggatttgtaagccggtctccggtgtgcccttgatatctgttttacaagtttatattttcatttccatttattatactgcattcttacttcatttccatacatatatatatatatatatatatatatatatatatatatatatatatatatatatatatatatattgtgaggtatgactaccttccgagcttgtgcttgttttatttaaattcctaggatcataagcaactaggtgtgtcct

SEQ ID NO: 15953 - DNA, 1126 bp, Glycine max
  Gm_smallRNAprecursor_8786
aagattaacacaaactttcttctggtaaaaaaccttaagaatgaagtaatcttaggaacgcccttcattagagccttgtttcccatccaaatatctaatgaaggaataaccacaaattatttaggaagaaaaattatatttaatttttctactaaaccaatttccagaaatataaatcttatagaaaataagattaatcaaattaacttcttaaaagaagaagtatcttttaataatattcagatacaactaggaaaatcccaagtaagagaaaaaattcaatctttattaaatcatattgaatcaaccgtttgttctgaattgccacatgcattttgggacagaaagaaacatattgtcgatctcccttatgagaaagactttagggaaaaacaaattcccacaaaatccagaccaatccaaatgaatgaagaacttcttcaatattgtcaaaaggaaatcaaggatttgctcgataaaggcctaatccgaaaaagcaaaagcccatggtcttgtgcggctttttatgtcaacaaacaatctgagattgagcgtggaacaccccgcttagtcataaattacaaaccattaaatcaagcattacaatcgattagatatcctattccaaacaaaaaagatttgcttaacagattaaattctgcaaagatattttcaaattttgatatgaaatctggattttggcaaatccaaatccaagaatcagataggtacaaaacagcgtttactgtacctttcgggcaatatgaatggaatgtgatgccattcggactgaagaatgccccttcagaatttcaaaaatttatgaacgatatttttaatccctattcaaaatttgtcattgtctacatagatgatgttttaatcttttcccaaaacattgaccaacatttcaaacatctccaaaccttcatacatatcatcaaacaaaatggtttggcagtctccaaatcaaaaatcaatcttttccaaactcgaattcgattccttggtcacaatatatatcaaggtacaatcattccaatcgaaaggtcaatagagtttgctagcaaattccccaaccaaatcttagacaaaacccagttacaaagatttctaggttgtctaa

SEQ ID NO: 15954 - DNA, 1063 bp, Glycine max
  Gm_smallRNAprecursor_8787
gtttcccatccaaatatctaatgaaggaataaccacaaattatttaggaagaaaaattatatttaatttttctactaaaccaatttccagaaatataaatcttatagaaaataagattaatcaaattaacttcttaaaagaagaagtatcttttaataatattcagatacaactaggaaaatcccaagtaagagaaaaaattcaatctttattaaatcatattgaatcaaccgtttgttctgaattgccacatgcattttgggacagaaagaaacatattgtcgatctcccttatgagaaagactttagggaaaaacaaattcccacaaaatccagaccaatccaaatgaatgaagaacttcttcaatattgtcaaaaggaaatcaaggatttgctcgataaaggcctaatccgaaaaagcaaaagcccatggtcttgtgcggctttttatgtcaacaaacaatctgagattgagcgtggaacaccccgcttagtcataaattacaaaccattaaatcaagcattacaatcgattagatatcctattccaaacaaaaaagatttgcttaacagattaaattctgcaaagatattttcaaattttgatatgaaatctggattttggcaaatccaaatccaagaatcagataggtacaaaacagcgtttactgtacctttcgggcaatatgaatggaatgtgatgccattcggactgaagaatgccccttcagaatttcaaaaatttatgaacgatatttttaatccctattcaaaatttgtcattgtctacatagatgatgttttaatcttttcccaaaacattgaccaacatttcaaacatctccaaaccttcatacatatcatcaaacaaaatggtttggcagtctccaaatcaaaaatcaatcttttccaaactcgaattcgattccttggtcacaatatatatcaaggtacaatcattccaatcgaaaggtcaatagagtttgctagcaaattccccaaccaaatcttagacaaaacccagttacaaagatttctaggttgtctaaattacgtaggagaa

SEQ ID NO: 15955 - DNA, 1080 bp, Glycine max
  Gm_smallRNAprecursor_8788
aaaagcaaaagcccatggtcttgtgcggctttttatgtcaacaaacaatctgagattgagcgtggaacaccccgcttagtcataaattacaaaccattaaatcaagcattacaatcgattagatatcctattccaaacaaaaaagatttgcttaacagattaaattctgcaaagatattttcaaattttgatatgaaatctggattttggcaaatccaaatccaagaatcagataggtacaaaacagcgtttactgtacctttcgggcaatatgaatggaatgtgatgccattcggactgaagaatgccccttcagaatttcaaaaatttatgaacgatatttttaatccctattcaaaatttgtcattgtctacatagatgatgttttaatcttttcccaaaacattgaccaacatttcaaacatctccaaaccttcatacatatcatcaaacaaaatggtttggcagtctccaaatcaaaaatcaatcttttccaaactcgaattcgattccttggtcacaatatatatcaaggtacaatcattccaatcgaaaggtcaatagagtttgctagcaaattccccaaccaaatcttagacaaaacccagttacaaagatttctaggttgtctaaattacgtaggagaatttgtcccctatttaaacaatattgtcaagccattgcatgataggctgaagaaaaatccgcctccttggtctgacctccatacacaaacggttaaagaaatcaaagtcaaagtccaatccattaaatgtctgtatcttcctattccacatgcatttaaaattgtcgaaactgatgcttcagacataggttatggtggcatcctcaaacaaagagtccatggccaagatcatgtcattgcatatacatcaaaacattggaatccttcacaattaaaatattcaactattaaaaaagaagttttagcaattgttttgtgcatttccaaatttcaatcggatttattaaaccaaaaatttttaatcagggttgattgtaaatcagccaaagatattttacaaaaagatgttaaaaaccttgcctcaaaacaaatt

SEQ ID NO: 15956 - DNA, 1168 bp, Glycine max
  Gm_smallRNAprecursor_8789
atggtcttgtgcggctttttatgtcaacaaacaatctgagattgagcgtggaacaccccgcttagtcataaattacaaaccattaaatcaagcattacaatcgattagatatcctattccaaacaaaaaagatttgcttaacagattaaattctgcaaagatattttcaaattttgatatgaaatctggattttggcaaatccaaatccaagaatcagataggtacaaaacagcgtttactgtacctttcgggcaatatgaatggaatgtgatgccattcggactgaagaatgccccttcagaatttcaaaaatttatgaacgatatttttaatccctattcaaaatttgtcattgtctacatagatgatgttttaatcttttcccaaaacattgaccaacatttcaaacatctccaaaccttcatacatatcatcaaacaaaatggtttggcagtctccaaatcaaaaatcaatcttttccaaactcgaattcgattccttggtcacaatatatatcaaggtacaatcattccaatcgaaaggtcaatagagtttgctagcaaattccccaaccaaatcttagacaaaacccagttacaaagatttctaggttgtctaaattacgtaggagaatttgtcccctatttaaacaatattgtcaagccattgcatgataggctgaagaaaaatccgcctccttggtctgacctccatacacaaacggttaaagaaatcaaagtcaaagtccaatccattaaatgtctgtatcttcctattccacatgcatttaaaattgtcgaaactgatgcttcagacataggttatggtggcatcctcaaacaaagagtccatggccaagatcatgtcattgcatatacatcaaaacattggaatccttcacaattaaaatattcaactattaaaaaagaagttttagcaattgttttgtgcatttccaaatttcaatcggatttattaaaccaaaaatttttaatcagggttgattgtaaatcagccaaagatattttacaaaaagatgttaaaaaccttgcctcaaaacaaatttttgcaagatggcaagcaattctaagtgtctttgattttgacatagaatacatcaagggcacctcaaattcattacctgactaccttacccgtgaattctta

SEQ ID NO: 15957 - DNA, 1095 bp, Glycine max
  Gm_smallRNAprecursor_8790
tgaatggaatgtgatgccattcggactgaagaatgccccttcagaatttcaaaaatttatgaacgatatttttaatccctattcaaaatttgtcattgtctacatagatgatgttttaatcttttcccaaaacattgaccaacatttcaaacatctccaaaccttcatacatatcatcaaacaaaatggtttggcagtctccaaatcaaaaatcaatcttttccaaactcgaattcgattccttggtcacaatatatatcaaggtacaatcattccaatcgaaaggtcaatagagtttgctagcaaattccccaaccaaatcttagacaaaacccagttacaaagatttctaggttgtctaaattacgtaggagaatttgtcccctatttaaacaatattgtcaagccattgcatgataggctgaagaaaaatccgcctccttggtctgacctccatacacaaacggttaaagaaatcaaagtcaaagtccaatccattaaatgtctgtatcttcctattccacatgcatttaaaattgtcgaaactgatgcttcagacataggttatggtggcatcctcaaacaaagagtccatggccaagatcatgtcattgcatatacatcaaaacattggaatccttcacaattaaaatattcaactattaaaaaagaagttttagcaattgttttgtgcatttccaaatttcaatcggatttattaaaccaaaaatttttaatcagggttgattgtaaatcagccaaagatattttacaaaaagatgttaaaaaccttgcctcaaaacaaatttttgcaagatggcaagcaattctaagtgtctttgattttgacatagaatacatcaagggcacctcaaattcattacctgactaccttacccgtgaattcttacagaaaagtggtaatgcctcctaaggcatcgggaatctccctacggggaggaaggagtacaagcaaaggagccagactggctcttccagagccaaccatcaagaaatcatcaacctcttctgggtcaccaacccaggctgggtcatctacccagaaaaccaatttagaaaggtcatcaacccaga

SEQ ID NO: 15958 - DNA, 1095 bp, Glycine max; identical to SEQ ID NO: 15957
  Gm_smallRNAprecursor_8791

SEQ ID NO: 15959 - DNA, 1095 bp, Glycine max; identical to SEQ ID NO: 15957
  Gm_smallRNAprecursor_8792

SEQ ID NO: 15960 - DNA, 1095 bp, Glycine max; identical to SEQ ID NO: 15957
  Gm_smallRNAprecursor_8793

SEQ ID NO: 15961 - DNA, 1113 bp, Glycine max
  Gm_smallRNAprecursor_8794
attgtctacatagatgatgttttaatcttttcccaaaacattgaccaacatttcaaacatctccaaaccttcatacatatcatcaaacaaaatggtttggcagtctccaaatcaaaaatcaatcttttccaaactcgaattcgattccttggtcacaatatatatcaaggtacaatcattccaatcgaaaggtcaatagagtttgctagcaaattccccaaccaaatcttagacaaaacccagttacaaagatttctaggttgtctaaattacgtaggagaatttgtcccctatttaaacaatattgtcaagccattgcatgataggctgaagaaaaatccgcctccttggtctgacctccatacacaaacggttaaagaaatcaaagtcaaagtccaatccattaaatgtctgtatcttcctattccacatgcatttaaaattgtcgaaactgatgcttcagacataggttatggtggcatcctcaaacaaagagtccatggccaagatcatgtcattgcatatacatcaaaacattggaatccttcacaattaaaatattcaactattaaaaaagaagttttagcaattgttttgtgcatttccaaatttcaatcggatttattaaaccaaaaatttttaatcagggttgattgtaaatcagccaaagatattttacaaaaagatgttaaaaaccttgcctcaaaacaaatttttgcaagatggcaagcaattctaagtgtctttgattttgacatagaatacatcaagggcacctcaaattcattacctgactaccttacccgtgaattcttacagaaaagtggtaatgcctcctaaggcatcgggaatctccctacggggaggaaggagtacaagcaaaggagccagactggctcttccagagccaaccatcaagaaatcatcaacctcttctgggtcaccaacccaggctgggtcatctacccagaaaaccaatttagaaaggtcatcaacccagattgcctcaatcaatcctgagccatccactcaggaatctcccaaaccggcaaccgccaaacaaacatcggctgactatgcatggccaattgaaacccttcaggcccttcaaga

SEQ ID NO: 15962 - DNA, 1113 bp, Glycine max; identical to SEQ ID NO: 15961
  Gm_smallRNAprecursor_8795

SEQ ID NO: 15963 - DNA, 1114 bp, Glycine max
  Gm_smallRNAprecursor_8796
attgtctacatagatgatgttttaatcttttcccaaaacattgaccaacatttcaaacatctccaaaccttcatacatatcatcaaacaaaatggtttggcagtctccaaatcaaaaatcaatcttttccaaactcgaattcgattccttggtcacaatatatatcaaggtacaatcattccaatcgaaaggtcaatagagtttgctagcaaattccccaaccaaatcttagacaaaacccagttacaaagatttctaggttgtctaaattacgtaggagaatttgtcccctatttaaacaatattgtcaagccattgcatgataggctgaagaaaaatccgcctccttggtctgacctccatacacaaacggttaaagaaatcaaagtcaaagtccaatccattaaatgtctgtatcttcctattccacatgcatttaaaattgtcgaaactgatgcttcagacataggttatggtggcatcctcaaacaaagagtccatggccaagatcatgtcattgcatatacatcaaaacattggaatccttcacaattaaaatattcaactattaaaaaagaagttttagcaattgttttgtgcatttccaaatttcaatcggatttattaaaccaaaaatttttaatcagggttgattgtaaatcagccaaagatattttacaaaaagatgttaaaaaccttgcctcaaaacaaatttttgcaagatggcaagcaattctaagtgtctttgattttgacatagaatacatcaagggcacctcaaattcattacctgactaccttacccgtgaattcttacagaaaagtggtaatgcctcctaaggcatcgggaatctccctacggggaggaaggagtacaagcaaaggagccagactggctcttccagagccaaccatcaagaaatcatcaacctcttctgggtcaccaacccaggctgggtcatctacccagaaaaccaatttagaaaggtcatcaacccagattgcctcaatcaatcctgagccatccactcaggaatctcccaaaccggcaaccgccaaacaaacatcggctgactatgcatggccaattgaaacccttcaggcccttcaagac

SEQ ID NO: 15964 - DNA, 1114 bp, Glycine max; identical to SEQ ID NO: 15963
  Gm_smallRNAprecursor_8797

SEQ ID NO: 15965 - DNA, 1158 bp, Glycine max
  Gm_smallRNAprecursor_8798
ctaaggcatcgggaatctccctacggggaggaaggagtacaagcaaaggagccagactggctcttccagagccaaccatcaagaaatcatcaacctcttctgggtcaccaacccaggctgggtcatctacccagaaaaccaatttagaaaggtcatcaacccagattgcctcaatcaatcctgagccatccactcaggaatctcccaaaccggcaaccgccaaacaaacatcggctgactatgcatggccaattgaaacccttcaggcccttcaagacatgggtctgaccaaatttccaaaaataatcaaaaaatcttgggcagacattgcctcagaatctgatgatgaatctgaatcaaatttacaaacaatgatccaaaatgtgtcaatgaccaaaacaaccaccaatactagaggaaaactacctttagccaaagctcaaacaccacctaccaaacaaactaacaattatgtttataaaaataaattgttaactgttttgcagatggaacctgaattttgggacaaaaatcccttcaaggcgacggccaaggctttcccaccaggatttcactacaaaccaaccaccatcttgaagacaagaactttttatgaattgattttggtagattcaaactcagtatctatcaaacacttcaaagatccaaaagaccaaacattaaacacccactcgacaatccaaatattaaaagttcttcaaccaagacactttggtttggacttgaacaaaggaaagagattctcagtcccatttgatccggtaggttatacctattgggattacgttgatgcttggactaaggtgttttggcaccaaaatacccgcttcaagcattcatggctgatatatttcaagaccaatacaatttacaattttcccaattggtttttgcaatggtgggacttctttggaccaatcccagagatattcccagaaacggtccaacaaggatttgcccaatttaagaagcaatacaattcgcaggaatcacgaattccagcagatcttaaatacttttcaagctttgcactgtcatggatattctcatggcaatatcgttacagcaagactgaaaagacaaaccaatatccatcactacaaagacacgcatttgtaaaatggtggacacaatttg

SEQ ID NO: 15966 - DNA, 1211 bp, Glycine max
  Gm_smallRNAprecursor_8799
ctaaggcatcgggaatctccctacggggaggaaggagtacaagcaaaggagccagactggctcttccagagccaaccatcaagaaatcatcaacctcttctgggtcaccaacccaggctgggtcatctacccagaaaaccaatttagaaaggtcatcaacccagattgcctcaatcaatcctgagccatccactcaggaatctcccaaaccggcaaccgccaaacaaacatcggctgactatgcatggccaattgaaacccttcaggcccttcaagacatgggtctgaccaaatttccaaaaataatcaaaaaatcttgggcagacattgcctcagaatctgatgatgaatctgaatcaaatttacaaacaatgatccaaaatgtgtcaatgaccaaaacaaccaccaatactagaggaaaactacctttagccaaagctcaaacaccacctaccaaacaaactaacaattatgtttataaaaataaattgttaactgttttgcagatggaacctgaattttgggacaaaaatcccttcaaggcgacggccaaggctttcccaccaggatttcactacaaaccaaccaccatcttgaagacaagaactttttatgaattgattttggtagattcaaactcagtatctatcaaacacttcaaagatccaaaagaccaaacattaaacacccactcgacaatccaaatattaaaagttcttcaaccaagacactttggtttggacttgaacaaaggaaagagattctcagtcccatttgatccggtaggttatacctattgggattacgttgatgcttggactaaggtgttttggcaccaaaatacccgcttcaagcattcatggctgatatatttcaagaccaatacaatttacaattttcccaattggtttttgcaatggtgggacttctttggaccaatcccagagatattcccagaaacggtccaacaaggatttgcccaatttaagaagcaatacaattcgcaggaatcacgaattccagcagatcttaaatacttttcaagctttgcactgtcatggatattctcatggcaatatcgttacagcaagactgaaaagacaaaccaatatccatcactacaaagacacgcatttgtaaaatggtggacacaatttgactcatctaaagcggatccagaacaagtaaaactctggttccaatcccatcca

SEQ ID NO: 15967 - DNA, 1098 bp, Glycine max
  Gm_smallRNAprecursor_8800
ggaatctccctacggggaggaaggagtacaagcaaaggagccagactggctcttccagagccaaccatcaagaaatcatcaacctcttctgggtcaccaacccaggctgggtcatctacccagaaaaccaatttagaaaggtcatcaacccagattgcctcaatcaatcctgagccatccactcaggaatctcccaaaccggcaaccgccaaacaaacatcggctgactatgcatggccaattgaaacccttcaggcccttcaagacatgggtctgaccaaatttccaaaaataatcaaaaaatcttgggcagacattgcctcagaatctgatgatgaatctgaatcaaatttacaaacaatgatccaaaatgtgtcaatgaccaaaacaaccaccaatactagaggaaaactacctttagccaaagctcaaacaccacctaccaaacaaactaacaattatgtttataaaaataaattgttaactgttttgcagatggaacctgaattttgggacaaaaatcccttcaaggcgacggccaaggctttcccaccaggatttcactacaaaccaaccaccatcttgaagacaagaactttttatgaattgattttggtagattcaaactcagtatctatcaaacacttcaaagatccaaaagaccaaacattaaacacccactcgacaatccaaatattaaaagttcttcaaccaagacactttggtttggacttgaacaaaggaaagagattctcagtcccatttgatccggtaggttatacctattgggattacgttgatgcttggactaaggtgttttggcaccaaaatacccgcttcaagcattcatggctgatatatttcaagaccaatacaatttacaattttcccaattggtttttgcaatggtgggacttctttggaccaatcccagagatattcccagaaacggtccaacaaggatttgcccaatttaagaagcaatacaattcgcaggaatcacgaattccagcagatcttaaatacttttcaagctttgcactgtcatggatattctcatggcaatatcgttacagcaagactgaaaagacaaaccaa

SEQ ID NO: 15968 - DNA, 1102 bp, Glycine max
  Gm_smallRNAprecursor_8801
cggcaaccgccaaacaaacatcggctgactatgcatggccaattgaaacccttcaggcccttcaagacatgggtctgaccaaatttccaaaaataatcaaaaaatcttgggcagacattgcctcagaatctgatgatgaatctgaatcaaatttacaaacaatgatccaaaatgtgtcaatgaccaaaacaaccaccaatactagaggaaaactacctttagccaaagctcaaacaccacctaccaaacaaactaacaattatgtttataaaaataaattgttaactgttttgcagatggaacctgaattttgggacaaaaatcccttcaaggcgacggccaaggctttcccaccaggatttcactacaaaccaaccaccatcttgaagacaagaactttttatgaattgattttggtagattcaaactcagtatctatcaaacacttcaaagatccaaaagaccaaacattaaacacccactcgacaatccaaatattaaaagttcttcaaccaagacactttggtttggacttgaacaaaggaaagagattctcagtcccatttgatccggtaggttatacctattgggattacgttgatgcttggactaaggtgttttggcaccaaaatacccgcttcaagcattcatggctgatatatttcaagaccaatacaatttacaattttcccaattggtttttgcaatggtgggacttctttggaccaatcccagagatattcccagaaacggtccaacaaggatttgcccaatttaagaagcaatacaattcgcaggaatcacgaattccagcagatcttaaatacttttcaagctttgcactgtcatggatattctcatggcaatatcgttacagcaagactgaaaagacaaaccaatatccatcactacaaagacacgcatttgtaaaatggtggacacaatttgactcatctaaagcggatccagaacaagtaaaactctggttccaatcccatccagaattcctcaaaccagctgatccagaaacttctgtgttcttgaaccaaaagtctcatctggcggcatttttagcaggatcgacatcaaaggaggtcttagc

SEQ ID NO: 15969 - DNA, 1098 bp, Glycine max
  Gm_smallRNAprecursor_8802
caagacatgggtctgaccaaatttccaaaaataatcaaaaaatcttgggcagacattgcctcagaatctgatgatgaatctgaatcaaatttacaaacaatgatccaaaatgtgtcaatgaccaaaacaaccaccaatactagaggaaaactacctttagccaaagctcaaacaccacctaccaaacaaactaacaattatgtttataaaaataaattgttaactgttttgcagatggaacctgaattttgggacaaaaatcccttcaaggcgacggccaaggctttcccaccaggatttcactacaaaccaaccaccatcttgaagacaagaactttttatgaattgattttggtagattcaaactcagtatctatcaaacacttcaaagatccaaaagaccaaacattaaacacccactcgacaatccaaatattaaaagttcttcaaccaagacactttggtttggacttgaacaaaggaaagagattctcagtcccatttgatccggtaggttatacctattgggattacgttgatgcttggactaaggtgttttggcaccaaaatacccgcttcaagcattcatggctgatatatttcaagaccaatacaatttacaattttcccaattggtttttgcaatggtgggacttctttggaccaatcccagagatattcccagaaacggtccaacaaggatttgcccaatttaagaagcaatacaattcgcaggaatcacgaattccagcagatcttaaatacttttcaagctttgcactgtcatggatattctcatggcaatatcgttacagcaagactgaaaagacaaaccaatatccatcactacaaagacacgcatttgtaaaatggtggacacaatttgactcatctaaagcggatccagaacaagtaaaactctggttccaatcccatccagaattcctcaaaccagctgatccagaaacttctgtgttcttgaaccaaaagtctcatctggcggcatttttagcaggatcgacatcaaaggaggtcttagctaaaaatctgaaggaagttctgcaaatgttacagcaggaagaagaagcttcatcctca

SEQ ID NO: 15970 - DNA, 1099 bp, Glycine max
  Gm_smallRNAprecursor_8803
caagacatgggtctgaccaaatttccaaaaataatcaaaaaatcttgggcagacattgcctcagaatctgatgatgaatctgaatcaaatttacaaacaatgatccaaaatgtgtcaatgaccaaaacaaccaccaatactagaggaaaactacctttagccaaagctcaaacaccacctaccaaacaaactaacaattatgtttataaaaataaattgttaactgttttgcagatggaacctgaattttgggacaaaaatcccttcaaggcgacggccaaggctttcccaccaggatttcactacaaaccaaccaccatcttgaagacaagaactttttatgaattgattttggtagattcaaactcagtatctatcaaacacttcaaagatccaaaagaccaaacattaaacacccactcgacaatccaaatattaaaagttcttcaaccaagacactttggtttggacttgaacaaaggaaagagattctcagtcccatttgatccggtaggttatacctattgggattacgttgatgcttggactaaggtgttttggcaccaaaatacccgcttcaagcattcatggctgatatatttcaagaccaatacaatttacaattttcccaattggtttttgcaatggtgggacttctttggaccaatcccagagatattcccagaaacggtccaacaaggatttgcccaatttaagaagcaatacaattcgcaggaatcacgaattccagcagatcttaaatacttttcaagctttgcactgtcatggatattctcatggcaatatcgttacagcaagactgaaaagacaaaccaatatccatcactacaaagacacgcatttgtaaaatggtggacacaatttgactcatctaaagcggatccagaacaagtaaaactctggttccaatcccatccagaattcctcaaaccagctgatccagaaacttctgtgttcttgaaccaaaagtctcatctggcggcatttttagcaggatcgacatcaaaggaggtcttagctaaaaatctgaaggaagttctgcaaatgttacagcaggaagaagaagcttcatcctcaa

SEQ ID NO: 15971 - DNA, 1244 bp, Glycine max
  Gm_smallRNAprecursor_8804
caagacatgggtctgaccaaatttccaaaaataatcaaaaaatcttgggcagacattgcctcagaatctgatgatgaatctgaatcaaatttacaaacaatgatccaaaatgtgtcaatgaccaaaacaaccaccaatactagaggaaaactacctttagccaaagctcaaacaccacctaccaaacaaactaacaattatgtttataaaaataaattgttaactgttttgcagatggaacctgaattttgggacaaaaatcccttcaaggcgacggccaaggctttcccaccaggatttcactacaaaccaaccaccatcttgaagacaagaactttttatgaattgattttggtagattcaaactcagtatctatcaaacacttcaaagatccaaaagaccaaacattaaacacccactcgacaatccaaatattaaaagttcttcaaccaagacactttggtttggacttgaacaaaggaaagagattctcagtcccatttgatccggtaggttatacctattgggattacgttgatgcttggactaaggtgttttggcaccaaaatacccgcttcaagcattcatggctgatatatttcaagaccaatacaatttacaattttcccaattggtttttgcaatggtgggacttctttggaccaatcccagagatattcccagaaacggtccaacaaggatttgcccaatttaagaagcaatacaattcgcaggaatcacgaattccagcagatcttaaatacttttcaagctttgcactgtcatggatattctcatggcaatatcgttacagcaagactgaaaagacaaaccaatatccatcactacaaagacacgcatttgtaaaatggtggacacaatttgactcatctaaagcggatccagaacaagtaaaactctggttccaatcccatccagaattcctcaaaccagctgatccagaaacttctgtgttcttgaaccaaaagtctcatctggcggcatttttagcaggatcgacatcaaaggaggtcttagctaaaaatctgaaggaagttctgcaaatgttacagcaggaagaagaagcttcatcctcaaagaaggaagaaacgagttctgctgaagaagaagaagaagatcccttttaccaaaacgaagatgattgttttggtatctgtttagaataaatttaatttcggtcacaaaaccgtctgtttgtaattaatgtgtaattaatgctgga

SEQ ID NO: 15972 - DNA, 1190 bp, Glycine max
  Gm_smallRNAprecursor_8805
caatgatccaaaatgtgtcaatgaccaaaacaaccaccaatactagaggaaaactacctttagccaaagctcaaacaccacctaccaaacaaactaacaattatgtttataaaaataaattgttaactgttttgcagatggaacctgaattttgggacaaaaatcccttcaaggcgacggccaaggctttcccaccaggatttcactacaaaccaaccaccatcttgaagacaagaactttttatgaattgattttggtagattcaaactcagtatctatcaaacacttcaaagatccaaaagaccaaacattaaacacccactcgacaatccaaatattaaaagttcttcaaccaagacactttggtttggacttgaacaaaggaaagagattctcagtcccatttgatccggtaggttatacctattgggattacgttgatgcttggactaaggtgttttggcaccaaaatacccgcttcaagcattcatggctgatatatttcaagaccaatacaatttacaattttcccaattggtttttgcaatggtgggacttctttggaccaatcccagagatattcccagaaacggtccaacaaggatttgcccaatttaagaagcaatacaattcgcaggaatcacgaattccagcagatcttaaatacttttcaagctttgcactgtcatggatattctcatggcaatatcgttacagcaagactgaaaagacaaaccaatatccatcactacaaagacacgcatttgtaaaatggtggacacaatttgactcatctaaagcggatccagaacaagtaaaactctggttccaatcccatccagaattcctcaaaccagctgatccagaaacttctgtgttcttgaaccaaaagtctcatctggcggcatttttagcaggatcgacatcaaaggaggtcttagctaaaaatctgaaggaagttctgcaaatgttacagcaggaagaagaagcttcatcctcaaagaaggaagaaacgagttctgctgaagaagaagaagaagatcccttttaccaaaacgaagatgattgttttggtatctgtttagaataaatttaatttcggtcacaaaaccgtctgtttgtaattaatgtgtaattaatgctggacaatactacctgtcctgtagccattaaagtcccggtcaaaact

SEQ ID NO: 15973 - DNA, 1146 bp, Glycine max
  Gm_smallRNAprecursor_8806
aatgatccaaaatgtgtcaatgaccaaaacaaccaccaatactagaggaaaactacctttagccaaagctcaaacaccacctaccaaacaaactaacaattatgtttataaaaataaattgttaactgttttgcagatggaacctgaattttgggacaaaaatcccttcaaggcgacggccaaggctttcccaccaggatttcactacaaaccaaccaccatcttgaagacaagaactttttatgaattgattttggtagattcaaactcagtatctatcaaacacttcaaagatccaaaagaccaaacattaaacacccactcgacaatccaaatattaaaagttcttcaaccaagacactttggtttggacttgaacaaaggaaagagattctcagtcccatttgatccggtaggttatacctattgggattacgttgatgcttggactaaggtgttttggcaccaaaatacccgcttcaagcattcatggctgatatatttcaagaccaatacaatttacaattttcccaattggtttttgcaatggtgggacttctttggaccaatcccagagatattcccagaaacggtccaacaaggatttgcccaatttaagaagcaatacaattcgcaggaatcacgaattccagcagatcttaaatacttttcaagctttgcactgtcatggatattctcatggcaatatcgttacagcaagactgaaaagacaaaccaatatccatcactacaaagacacgcatttgtaaaatggtggacacaatttgactcatctaaagcggatccagaacaagtaaaactctggttccaatcccatccagaattcctcaaaccagctgatccagaaacttctgtgttcttgaaccaaaagtctcatctggcggcatttttagcaggatcgacatcaaaggaggtcttagctaaaaatctgaaggaagttctgcaaatgttacagcaggaagaagaagcttcatcctcaaagaaggaagaaacgagttctgctgaagaagaagaagaagatcccttttaccaaaacgaagatgattgttttggtatctgtttagaataaatttaatttcggtcacaaaaccgtctgtttgtaattaatgtgtaattaatgctgga

SEQ ID NO: 15974 - DNA, 1189 bp, Glycine max
  Gm_smallRNAprecursor_8807
aatgatccaaaatgtgtcaatgaccaaaacaaccaccaatactagaggaaaactacctttagccaaagctcaaacaccacctaccaaacaaactaacaattatgtttataaaaataaattgttaactgttttgcagatggaacctgaattttgggacaaaaatcccttcaaggcgacggccaaggctttcccaccaggatttcactacaaaccaaccaccatcttgaagacaagaactttttatgaattgattttggtagattcaaactcagtatctatcaaacacttcaaagatccaaaagaccaaacattaaacacccactcgacaatccaaatattaaaagttcttcaaccaagacactttggtttggacttgaacaaaggaaagagattctcagtcccatttgatccggtaggttatacctattgggattacgttgatgcttggactaaggtgttttggcaccaaaatacccgcttcaagcattcatggctgatatatttcaagaccaatacaatttacaattttcccaattggtttttgcaatggtgggacttctttggaccaatcccagagatattcccagaaacggtccaacaaggatttgcccaatttaagaagcaatacaattcgcaggaatcacgaattccagcagatcttaaatacttttcaagctttgcactgtcatggatattctcatggcaatatcgttacagcaagactgaaaagacaaaccaatatccatcactacaaagacacgcatttgtaaaatggtggacacaatttgactcatctaaagcggatccagaacaagtaaaactctggttccaatcccatccagaattcctcaaaccagctgatccagaaacttctgtgttcttgaaccaaaagtctcatctggcggcatttttagcaggatcgacatcaaaggaggtcttagctaaaaatctgaaggaagttctgcaaatgttacagcaggaagaagaagcttcatcctcaaagaaggaagaaacgagttctgctgaagaagaagaagaagatcccttttaccaaaacgaagatgattgttttggtatctgtttagaataaatttaatttcggtcacaaaaccgtctgtttgtaattaatgtgtaattaatgctggacaatactacctgtcctgtagccattaaagtcccggtcaaaact

SEQ ID NO: 15975 - DNA, 1144 bp, Glycine max
  Gm_smallRNAprecursor_8808
tgatccaaaatgtgtcaatgaccaaaacaaccaccaatactagaggaaaactacctttagccaaagctcaaacaccacctaccaaacaaactaacaattatgtttataaaaataaattgttaactgttttgcagatggaacctgaattttgggacaaaaatcccttcaaggcgacggccaaggctttcccaccaggatttcactacaaaccaaccaccatcttgaagacaagaactttttatgaattgattttggtagattcaaactcagtatctatcaaacacttcaaagatccaaaagaccaaacattaaacacccactcgacaatccaaatattaaaagttcttcaaccaagacactttggtttggacttgaacaaaggaaagagattctcagtcccatttgatccggtaggttatacctattgggattacgttgatgcttggactaaggtgttttggcaccaaaatacccgcttcaagcattcatggctgatatatttcaagaccaatacaatttacaattttcccaattggtttttgcaatggtgggacttctttggaccaatcccagagatattcccagaaacggtccaacaaggatttgcccaatttaagaagcaatacaattcgcaggaatcacgaattccagcagatcttaaatacttttcaagctttgcactgtcatggatattctcatggcaatatcgttacagcaagactgaaaagacaaaccaatatccatcactacaaagacacgcatttgtaaaatggtggacacaatttgactcatctaaagcggatccagaacaagtaaaactctggttccaatcccatccagaattcctcaaaccagctgatccagaaacttctgtgttcttgaaccaaaagtctcatctggcggcatttttagcaggatcgacatcaaaggaggtcttagctaaaaatctgaaggaagttctgcaaatgttacagcaggaagaagaagcttcatcctcaaagaaggaagaaacgagttctgctgaagaagaagaagaagatcccttttaccaaaacgaagatgattgttttggtatctgtttagaataaatttaatttcggtcacaaaaccgtctgtttgtaattaatgtgtaattaatgctgga

SEQ ID NO: 15976 - DNA, 1159 bp, Glycine max
  Gm_smallRNAprecursor_8809
gaattttgggacaaaaatcccttcaaggcgacggccaaggctttcccaccaggatttcactacaaaccaaccaccatcttgaagacaagaactttttatgaattgattttggtagattcaaactcagtatctatcaaacacttcaaagatccaaaagaccaaacattaaacacccactcgacaatccaaatattaaaagttcttcaaccaagacactttggtttggacttgaacaaaggaaagagattctcagtcccatttgatccggtaggttatacctattgggattacgttgatgcttggactaaggtgttttggcaccaaaatacccgcttcaagcattcatggctgatatatttcaagaccaatacaatttacaattttcccaattggtttttgcaatggtgggacttctttggaccaatcccagagatattcccagaaacggtccaacaaggatttgcccaatttaagaagcaatacaattcgcaggaatcacgaattccagcagatcttaaatacttttcaagctttgcactgtcatggatattctcatggcaatatcgttacagcaagactgaaaagacaaaccaatatccatcactacaaagacacgcatttgtaaaatggtggacacaatttgactcatctaaagcggatccagaacaagtaaaactctggttccaatcccatccagaattcctcaaaccagctgatccagaaacttctgtgttcttgaaccaaaagtctcatctggcggcatttttagcaggatcgacatcaaaggaggtcttagctaaaaatctgaaggaagttctgcaaatgttacagcaggaagaagaagcttcatcctcaaagaaggaagaaacgagttctgctgaagaagaagaagaagatcccttttaccaaaacgaagatgattgttttggtatctgtttagaataaatttaatttcggtcacaaaaccgtctgtttgtaattaatgtgtaattaatgctggacaatactacctgtcctgtagccattaaagtcccggtcaaaactacttgtcttgtaacaaacagtcaaatagtcccggtcaaaactaccggcaactaccggtcttagatttttggctatataaggagtcctcaagtatgttgtgaggcaccctttcatt

SEQ ID NO: 15977 - DNA, 1131 bp, Glycine max
  Gm_smallRNAprecursor_8810
cgacggccaaggctttcccaccaggatttcactacaaaccaaccaccatcttgaagacaagaactttttatgaattgattttggtagattcaaactcagtatctatcaaacacttcaaagatccaaaagaccaaacattaaacacccactcgacaatccaaatattaaaagttcttcaaccaagacactttggtttggacttgaacaaaggaaagagattctcagtcccatttgatccggtaggttatacctattgggattacgttgatgcttggactaaggtgttttggcaccaaaatacccgcttcaagcattcatggctgatatatttcaagaccaatacaatttacaattttcccaattggtttttgcaatggtgggacttctttggaccaatcccagagatattcccagaaacggtccaacaaggatttgcccaatttaagaagcaatacaattcgcaggaatcacgaattccagcagatcttaaatacttttcaagctttgcactgtcatggatattctcatggcaatatcgttacagcaagactgaaaagacaaaccaatatccatcactacaaagacacgcatttgtaaaatggtggacacaatttgactcatctaaagcggatccagaacaagtaaaactctggttccaatcccatccagaattcctcaaaccagctgatccagaaacttctgtgttcttgaaccaaaagtctcatctggcggcatttttagcaggatcgacatcaaaggaggtcttagctaaaaatctgaaggaagttctgcaaatgttacagcaggaagaagaagcttcatcctcaaagaaggaagaaacgagttctgctgaagaagaagaagaagatcccttttaccaaaacgaagatgattgttttggtatctgtttagaataaatttaatttcggtcacaaaaccgtctgtttgtaattaatgtgtaattaatgctggacaatactacctgtcctgtagccattaaagtcccggtcaaaactacttgtcttgtaacaaacagtcaaatagtcccggtcaaaactaccggcaactaccggtcttagatttttggctatataaggagtcctcaagtatgttgtgaggcaccctttcatt

SEQ ID NO: 15978 - DNA, 1080 bp, Glycine max
  Gm_smallRNAprecursor_8811
tcaagcattcatggctgatatatttcaagaccaatacaatttacaattttcccaattggtttttgcaatggtgggacttctttggaccaatcccagagatattcccagaaacggtccaacaaggatttgcccaatttaagaagcaatacaattcgcaggaatcacgaattccagcagatcttaaatacttttcaagctttgcactgtcatggatattctcatggcaatatcgttacagcaagactgaaaagacaaaccaatatccatcactacaaagacacgcatttgtaaaatggtggacacaatttgactcatctaaagcggatccagaacaagtaaaactctggttccaatcccatccagaattcctcaaaccagctgatccagaaacttctgtgttcttgaaccaaaagtctcatctggcggcatttttagcaggatcgacatcaaaggaggtcttagctaaaaatctgaaggaagttctgcaaatgttacagcaggaagaagaagcttcatcctcaaagaaggaagaaacgagttctgctgaagaagaagaagaagatcccttttaccaaaacgaagatgattgttttggtatctgtttagaataaatttaatttcggtcacaaaaccgtctgtttgtaattaatgtgtaattaatgctggacaatactacctgtcctgtagccattaaagtcccggtcaaaactacttgtcttgtaacaaacagtcaaatagtcccggtcaaaactaccggcaactaccggtcttagatttttggctatataaggagtcctcaagtatgttgtgaggcaccctttcatttagccatttttcaggtatatatatatatatatatatatattcgatagcaaacgacaagccaaaaaagggagaaaccctaaagcctaggcccaactctagggtttggactaacaaattacattatgtttgccacagaaatttcgggttgtttgatagtttactagtttcccaactcgaactcaggcgggcatggctgcacccagtttgattgctcttgagggacttcatcattgatcatggtgatccacccttcac

SEQ ID NO: 15979 - DNA, 1081 bp, Glycine max
  Gm_smallRNAprecursor_8812
tcaagcattcatggctgatatatttcaagaccaatacaatttacaattttcccaattggtttttgcaatggtgggacttctttggaccaatcccagagatattcccagaaacggtccaacaaggatttgcccaatttaagaagcaatacaattcgcaggaatcacgaattccagcagatcttaaatacttttcaagctttgcactgtcatggatattctcatggcaatatcgttacagcaagactgaaaagacaaaccaatatccatcactacaaagacacgcatttgtaaaatggtggacacaatttgactcatctaaagcggatccagaacaagtaaaactctggttccaatcccatccagaattcctcaaaccagctgatccagaaacttctgtgttcttgaaccaaaagtctcatctggcggcatttttagcaggatcgacatcaaaggaggtcttagctaaaaatctgaaggaagttctgcaaatgttacagcaggaagaagaagcttcatcctcaaagaaggaagaaacgagttctgctgaagaagaagaagaagatcccttttaccaaaacgaagatgattgttttggtatctgtttagaataaatttaatttcggtcacaaaaccgtctgtttgtaattaatgtgtaattaatgctggacaatactacctgtcctgtagccattaaagtcccggtcaaaactacttgtcttgtaacaaacagtcaaatagtcccggtcaaaactaccggcaactaccggtcttagatttttggctatataaggagtcctcaagtatgttgtgaggcaccctttcatttagccatttttcaggtatatatatatatatatatatatattcgatagcaaacgacaagccaaaaaagggagaaaccctaaagcctaggcccaactctagggtttggactaacaaattacattatgtttgccacagaaatttcgggttgtttgatagtttactagtttcccaactcgaactcaggcgggcatggctgcacccagtttgattgctcttgagggacttcatcattgatcatggtgatccacccttcaca

SEQ ID NO: 15980 - DNA, 1082 bp, Glycine max
  Gm_smallRNAprecursor_8813
tcaagcattcatggctgatatatttcaagaccaatacaatttacaattttcccaattggtttttgcaatggtgggacttctttggaccaatcccagagatattcccagaaacggtccaacaaggatttgcccaatttaagaagcaatacaattcgcaggaatcacgaattccagcagatcttaaatacttttcaagctttgcactgtcatggatattctcatggcaatatcgttacagcaagactgaaaagacaaaccaatatccatcactacaaagacacgcatttgtaaaatggtggacacaatttgactcatctaaagcggatccagaacaagtaaaactctggttccaatcccatccagaattcctcaaaccagctgatccagaaacttctgtgttcttgaaccaaaagtctcatctggcggcatttttagcaggatcgacatcaaaggaggtcttagctaaaaatctgaaggaagttctgcaaatgttacagcaggaagaagaagcttcatcctcaaagaaggaagaaacgagttctgctgaagaagaagaagaagatcccttttaccaaaacgaagatgattgttttggtatctgtttagaataaatttaatttcggtcacaaaaccgtctgtttgtaattaatgtgtaattaatgctggacaatactacctgtcctgtagccattaaagtcccggtcaaaactacttgtcttgtaacaaacagtcaaatagtcccggtcaaaactaccggcaactaccggtcttagatttttggctatataaggagtcctcaagtatgttgtgaggcaccctttcatttagccatttttcaggtatatatatatatatatatatatattcgatagcaaacgacaagccaaaaaagggagaaaccctaaagcctaggcccaactctagggtttggactaacaaattacattatgtttgccacagaaatttcgggttgtttgatagtttactagtttcccaactcgaactcaggcgggcatggctgcacccagtttgattgctcttgagggacttcatcattgatcatggtgatccacccttcacat

SEQ ID NO: 15981 - DNA, 1155 bp, Glycine max
  Gm_smallRNAprecursor_8814
tgggacttctttggaccaatcccagagatattcccagaaacggtccaacaaggatttgcccaatttaagaagcaatacaattcgcaggaatcacgaattccagcagatcttaaatacttttcaagctttgcactgtcatggatattctcatggcaatatcgttacagcaagactgaaaagacaaaccaatatccatcactacaaagacacgcatttgtaaaatggtggacacaatttgactcatctaaagcggatccagaacaagtaaaactctggttccaatcccatccagaattcctcaaaccagctgatccagaaacttctgtgttcttgaaccaaaagtctcatctggcggcatttttagcaggatcgacatcaaaggaggtcttagctaaaaatctgaaggaagttctgcaaatgttacagcaggaagaagaagcttcatcctcaaagaaggaagaaacgagttctgctgaagaagaagaagaagatcccttttaccaaaacgaagatgattgttttggtatctgtttagaataaatttaatttcggtcacaaaaccgtctgtttgtaattaatgtgtaattaatgctggacaatactacctgtcctgtagccattaaagtcccggtcaaaactacttgtcttgtaacaaacagtcaaatagtcccggtcaaaactaccggcaactaccggtcttagatttttggctatataaggagtcctcaagtatgttgtgaggcaccctttcatttagccatttttcaggtatatatatatatatatatatatattcgatagcaaacgacaagccaaaaaagggagaaaccctaaagcctaggcccaactctagggtttggactaacaaattacattatgtttgccacagaaatttcgggttgtttgatagtttactagtttcccaactcgaactcaggcgggcatggctgcacccagtttgattgctcttgagggacttcatcattgatcatggtgatccacccttcacatatccagcccgtgctaatgaagctttcattgatgtggcataagggagtccctttcacttgcagtccttgttgctggcccatgcttcggcccttttttttctagggtgcttctccttacgtcggtgcgtgtaggcttatatcccat

SEQ ID NO: 15982 - DNA, 1142 bp, Glycine max
  Gm_smallRNAprecursor_8815
gaccaatcccagagatattcccagaaacggtccaacaaggatttgcccaatttaagaagcaatacaattcgcaggaatcacgaattccagcagatcttaaatacttttcaagctttgcactgtcatggatattctcatggcaatatcgttacagcaagactgaaaagacaaaccaatatccatcactacaaagacacgcatttgtaaaatggtggacacaatttgactcatctaaagcggatccagaacaagtaaaactctggttccaatcccatccagaattcctcaaaccagctgatccagaaacttctgtgttcttgaaccaaaagtctcatctggcggcatttttagcaggatcgacatcaaaggaggtcttagctaaaaatctgaaggaagttctgcaaatgttacagcaggaagaagaagcttcatcctcaaagaaggaagaaacgagttctgctgaagaagaagaagaagatcccttttaccaaaacgaagatgattgttttggtatctgtttagaataaatttaatttcggtcacaaaaccgtctgtttgtaattaatgtgtaattaatgctggacaatactacctgtcctgtagccattaaagtcccggtcaaaactacttgtcttgtaacaaacagtcaaatagtcccggtcaaaactaccggcaactaccggtcttagatttttggctatataaggagtcctcaagtatgttgtgaggcaccctttcatttagccatttttcaggtatatatatatatatatatatatattcgatagcaaacgacaagccaaaaaagggagaaaccctaaagcctaggcccaactctagggtttggactaacaaattacattatgtttgccacagaaatttcgggttgtttgatagtttactagtttcccaactcgaactcaggcgggcatggctgcacccagtttgattgctcttgagggacttcatcattgatcatggtgatccacccttcacatatccagcccgtgctaatgaagctttcattgatgtggcataagggagtccctttcacttgcagtccttgttgctggcccatgcttcggcccttttttttctagggtgcttctccttacgtcggtgcgtgtaggcttatatcccat

SEQ ID NO: 15983 - DNA, 1198 bp, Glycine max
  Gm_smallRNAprecursor_8816
aacggtccaacaaggatttgcccaatttaagaagcaatacaattcgcaggaatcacgaattccagcagatcttaaatacttttcaagctttgcactgtcatggatattctcatggcaatatcgttacagcaagactgaaaagacaaaccaatatccatcactacaaagacacgcatttgtaaaatggtggacacaatttgactcatctaaagcggatccagaacaagtaaaactctggttccaatcccatccagaattcctcaaaccagctgatccagaaacttctgtgttcttgaaccaaaagtctcatctggcggcatttttagcaggatcgacatcaaaggaggtcttagctaaaaatctgaaggaagttctgcaaatgttacagcaggaagaagaagcttcatcctcaaagaaggaagaaacgagttctgctgaagaagaagaagaagatcccttttaccaaaacgaagatgattgttttggtatctgtttagaataaatttaatttcggtcacaaaaccgtctgtttgtaattaatgtgtaattaatgctggacaatactacctgtcctgtagccattaaagtcccggtcaaaactacttgtcttgtaacaaacagtcaaatagtcccggtcaaaactaccggcaactaccggtcttagatttttggctatataaggagtcctcaagtatgttgtgaggcaccctttcatttagccatttttcaggtatatatatatatatatatatatattcgatagcaaacgacaagccaaaaaagggagaaaccctaaagcctaggcccaactctagggtttggactaacaaattacattatgtttgccacagaaatttcgggttgtttgatagtttactagtttcccaactcgaactcaggcgggcatggctgcacccagtttgattgctcttgagggacttcatcattgatcatggtgatccacccttcacatatccagcccgtgctaatgaagctttcattgatgtggcataagggagtccctttcacttgcagtccttgttgctggcccatgcttcggcccttttttttctagggtgcttctccttacgtcggtgcgtgtaggcttatatcccattccgggctcgtactcgtgccctaacattactcgagctaccatcaacgcggcgctggatgaatgtggttgcaccggggggga

SEQ ID NO: 15984 - DNA, 1159 bp, Glycine max
  Gm_smallRNAprecursor_8817
cccatttttcaggaagagttacctcatcccattttattgtccttgggagagaaacattgacctttgtcatatcagtgataaacaaagttgtctctcctttttgaggttttaaaaggactctagacgcacaagtattcatgaccttgtactgtatcctataaattaaagttgttggaattgatcattctttcatgtcaaggccatgaaagtggatgtttaagaacaaagagtcaagaatgtttctgtccatgagaccactgttttgtttggataacagttgaaatatactagaccttgtcctaagcttgtttctacctttccgattagggaatctttaaatttattatgcctaatatctctaaggcacatcaaaactgctgcatctatgcccatatcaattaagggcttgatggctacttgaacacaatcgatgtgtaaatgtttgtacttacggctatattcataaattgatttgtttgaaagtaaatggaattcttcccctatatcttgtcctagaggaatattaatttctactgttctgattatataatcaaagttatgtttttctttaattgtttcaggaacatacagtgtatcctgagagatttctggaatgttccagtcatccatgttttgatttatatctttgaattagacttcctcatcgaagagattgtgttttggggcgacctcgtgggtcttgttttcatgctcattaagcaaattgctgtttttgggtgagttcattgaagaagaggatgaagatgagttggatttaaataaaatgcgagaaaaggaacgtaaaaggtgagacatgataaattcatcctccaatatctttgtcatcatatggttccatagaaatatttctgtaagcatatatgtaactaaatttcctggatctgaaaaatttaagaaaccctcttttttttttttttaaacatgcaatatagtttgaacgatacttccataaccaccagtatattatgtcttaacattttatttgaacaatacaccttagtcttcctgcccttcatcatccacgggtcttactgctacagtattattcaactaaaatatcagactgttgtgcttccaaaaaatactgttcaaacatatactgtttaaattaaaattactgtacacaggttcaaatcca

SEQ ID NO: 15985 - DNA, 1140 bp, Glycine max
  Gm_smallRNAprecursor_8818
gtgagaagaagtccacccatacctgaaattcgaagtcccacaacgtagaggtgcgcttcacgactccgaaaatagcttctccttgcgatttggagtagagatgagaagaaattttggagctttaatggagaacaaaggtggagaagaaggaagaagaaaaagctacgtgaaaagggagaagaaaagcttctgaattttctgaaggagagagaaacttagcttttatataaaaatgattttcttttccccttttttttcataaagcaatgccacttgtcccattttgtgtggagcaaagaggggtccacctcttctcttgatgtgacttcatactcagccacaaggagggaaaaatttgaccttttgaatgctaaaatcctgccttagtttgcgtgccgcttctctggtttcagttcctcgcgtttctctgcacccgtcggggcccgttttcgaaagtaggcaatatatatatcaaaacgctcagaatgaaaccctgagcgtggttcaaaggttggttttgttaaatttttagttgcacgcaaaacgataatttttagactaattaattgagaattaatctataactgtccagttatggattactcttcgttaatcagcctaacccgcgtatctttcccccaatgtacatacttctaccaggagtatatatatatacactgaataatacatatatatatatatataattatttaaaatataatgcttacaaaattccaggtagaaatttccaggatgtcacatgaacaaggtccttgaacaaaatattgagtttctaaaggatgttacttgttctaatcatgcattgaagggtgaacttgttgaagctaacaaggcaaagaatagactattggataggattcttgatctagaagctgattatgataaagtaattggtgatgtcattgagaaggatgtggcttctgaattttctttccaacaggtttattttctcgaacatcaaaacacagagttagagaaagtaaactatatgttggaaaattcatcttacagacttaagaataagctgaacctaaaggatttggagttaaccagaatgcaaaacttactggaggttgagttatctagaaaggataatgtaataaaaggactgttgtatga

SEQ ID NO: 15986 - DNA, 1218 bp, Glycine max
  Gm_smallRNAprecursor_8819
gaagaagttacgaaaactcacggattgcgaaaaacacatcctttcgatttccgtcacattacggaattttcacggatcgcgtaagcctgcttccttttgattttcggcacgtctcgggacttcacatattgtgcaacaaagggtgcaaagtatctcgaagcggccaatcaaaggttgtatatcatcaaataataatccccggacgaaattagggtatgacagtaaggtagtcaggtaatgagtttgaggtgcccttgatgtattctatgtcaaaatcaaagacacttagaattgcttgccatcttgcaaaaatttgttttgaggaaaggtttttaacatctttttgtaaaatatctttggctgatttacaatcaaccctgattagaaatttttggtttaataaatccgattgaaatttggaaaagcacaaaacaattgctaaaacttcttttttaacagttgaatattttaattgtgcaggattccaatgttttgatgtatatgcaatgacatgatcttggccatggactctttgtttgaggatgccaccataacctatgtctgaagcatcagtttcgacaattttaaatgcctgtgcaataggaagatatagacatttaatggattggactttgactttgatttctttaaccgtttgtgtatggaggtcagaccaaggaggcagatttttcttcagcctatcatgcaatggcttgacaatattgtttaaataggggacaaattctcctacgtaatttagacaacctagaaatctttgtaactgggttttgtctaagatttggttggggaatttgctagcaaactctattgacctttcgattggaatgattgtaccttgatatatattgtgaccaaggaatcgaattcgagtttggaaaagattgatttttgatttggagactgccaaaccattttgtttgatgatatgtatgaaggtttggagatgtttgaaatgttggtcaatgttttgggaaaagattaaaacatcatctatgtagacaatgacaaattttgaatagggattaaaaatatcgttcataattttttgaaattctgaaggggcattcttcagtccgaatggcatcacgttccattcgtattgctcgaaaggtacagtaaacgctgttttgtacctatctgattcttggatttggatttgccaaaatccagatttcatatcaaattttgaaaatatct

SEQ ID NO: 15987 - DNA, 1071 bp, Glycine max
  Gm_smallRNAprecursor_8820
ttcgatttccgtcacattacggaattttcacggatcgcgtaagcctgcttccttttgattttcggcacgtctcgggacttcacatattgtgcaacaaagggtgcaaagtatctcgaagcggccaatcaaaggttgtatatcatcaaataataatccccggacgaaattagggtatgacagtaaggtagtcaggtaatgagtttgaggtgcccttgatgtattctatgtcaaaatcaaagacacttagaattgcttgccatcttgcaaaaatttgttttgaggaaaggtttttaacatctttttgtaaaatatctttggctgatttacaatcaaccctgattagaaatttttggtttaataaatccgattgaaatttggaaaagcacaaaacaattgctaaaacttcttttttaacagttgaatattttaattgtgcaggattccaatgttttgatgtatatgcaatgacatgatcttggccatggactctttgtttgaggatgccaccataacctatgtctgaagcatcagtttcgacaattttaaatgcctgtgcaataggaagatatagacatttaatggattggactttgactttgatttctttaaccgtttgtgtatggaggtcagaccaaggaggcagatttttcttcagcctatcatgcaatggcttgacaatattgtttaaataggggacaaattctcctacgtaatttagacaacctagaaatctttgtaactgggttttgtctaagatttggttggggaatttgctagcaaactctattgacctttcgattggaatgattgtaccttgatatatattgtgaccaaggaatcgaattcgagtttggaaaagattgatttttgatttggagactgccaaaccattttgtttgatgatatgtatgaaggtttggagatgtttgaaatgttggtcaatgttttgggaaaagattaaaacatcatctatgtagacaatgacaaattttgaatagggattaaaaatatcgttcataattttttgaaattctgaaggggcattcttcagtccgaatggcatcacgttcc

SEQ ID NO: 15988 - DNA, 1073 bp, Glycine max
  Gm_smallRNAprecursor_8821
ttcgatttccgtcacattacggaattttcacggatcgcgtaagcctgcttccttttgattttcggcacgtctcgggacttcacatattgtgcaacaaagggtgcaaagtatctcgaagcggccaatcaaaggttgtatatcatcaaataataatccccggacgaaattagggtatgacagtaaggtagtcaggtaatgagtttgaggtgcccttgatgtattctatgtcaaaatcaaagacacttagaattgcttgccatcttgcaaaaatttgttttgaggaaaggtttttaacatctttttgtaaaatatctttggctgatttacaatcaaccctgattagaaatttttggtttaataaatccgattgaaatttggaaaagcacaaaacaattgctaaaacttcttttttaacagttgaatattttaattgtgcaggattccaatgttttgatgtatatgcaatgacatgatcttggccatggactctttgtttgaggatgccaccataacctatgtctgaagcatcagtttcgacaattttaaatgcctgtgcaataggaagatatagacatttaatggattggactttgactttgatttctttaaccgtttgtgtatggaggtcagaccaaggaggcagatttttcttcagcctatcatgcaatggcttgacaatattgtttaaataggggacaaattctcctacgtaatttagacaacctagaaatctttgtaactgggttttgtctaagatttggttggggaatttgctagcaaactctattgacctttcgattggaatgattgtaccttgatatatattgtgaccaaggaatcgaattcgagtttggaaaagattgatttttgatttggagactgccaaaccattttgtttgatgatatgtatgaaggtttggagatgtttgaaatgttggtcaatgttttgggaaaagattaaaacatcatctatgtagacaatgacaaattttgaatagggattaaaaatatcgttcataattttttgaaattctgaaggggcattcttcagtccgaatggcatcacgttccat

SEQ ID NO: 15989 - DNA, 1109 bp, Glycine max
  Gm_smallRNAprecursor_8822
gacagtaaggtagtcaggtaatgagtttgaggtgcccttgatgtattctatgtcaaaatcaaagacacttagaattgcttgccatcttgcaaaaatttgttttgaggaaaggtttttaacatctttttgtaaaatatctttggctgatttacaatcaaccctgattagaaatttttggtttaataaatccgattgaaatttggaaaagcacaaaacaattgctaaaacttcttttttaacagttgaatattttaattgtgcaggattccaatgttttgatgtatatgcaatgacatgatcttggccatggactctttgtttgaggatgccaccataacctatgtctgaagcatcagtttcgacaattttaaatgcctgtgcaataggaagatatagacatttaatggattggactttgactttgatttctttaaccgtttgtgtatggaggtcagaccaaggaggcagatttttcttcagcctatcatgcaatggcttgacaatattgtttaaataggggacaaattctcctacgtaatttagacaacctagaaatctttgtaactgggttttgtctaagatttggttggggaatttgctagcaaactctattgacctttcgattggaatgattgtaccttgatatatattgtgaccaaggaatcgaattcgagtttggaaaagattgatttttgatttggagactgccaaaccattttgtttgatgatatgtatgaaggtttggagatgtttgaaatgttggtcaatgttttgggaaaagattaaaacatcatctatgtagacaatgacaaattttgaatagggattaaaaatatcgttcataattttttgaaattctgaaggggcattcttcagtccgaatggcatcacgttccattcgtattgctcgaaaggtacagtaaacgctgttttgtacctatctgattcttggatttggatttgccaaaatccagatttcatatcaaattttgaaaatatctttgcagaatttaatctgttaagcaaatcttttttgtttggaataggatatctaatccactgtaatgcttgatttagtggtttgtaatttatgactaagcggggtgttc

SEQ ID NO: 15990 - DNA, 1196 bp, Glycine max
  Gm_smallRNAprecursor_8823
aaggtttttaacatctttttgtaaaatatctttggctgatttacaatcaaccctgattagaaatttttggtttaataaatccgattgaaatttggaaaagcacaaaacaattgctaaaacttcttttttaacagttgaatattttaattgtgcaggattccaatgttttgatgtatatgcaatgacatgatcttggccatggactctttgtttgaggatgccaccataacctatgtctgaagcatcagtttcgacaattttaaatgcctgtgcaataggaagatatagacatttaatggattggactttgactttgatttctttaaccgtttgtgtatggaggtcagaccaaggaggcagatttttcttcagcctatcatgcaatggcttgacaatattgtttaaataggggacaaattctcctacgtaatttagacaacctagaaatctttgtaactgggttttgtctaagatttggttggggaatttgctagcaaactctattgacctttcgattggaatgattgtaccttgatatatattgtgaccaaggaatcgaattcgagtttggaaaagattgatttttgatttggagactgccaaaccattttgtttgatgatatgtatgaaggtttggagatgtttgaaatgttggtcaatgttttgggaaaagattaaaacatcatctatgtagacaatgacaaattttgaatagggattaaaaatatcgttcataattttttgaaattctgaaggggcattcttcagtccgaatggcatcacgttccattcgtattgctcgaaaggtacagtaaacgctgttttgtacctatctgattcttggatttggatttgccaaaatccagatttcatatcaaattttgaaaatatctttgcagaatttaatctgttaagcaaatcttttttgtttggaataggatatctaatccactgtaatgcttgatttagtggtttgtaatttatgactaagcggggtgttccacgctcaatctcagattgtttattgacataaaaagccgcacaagaccatgggcttttgcttttccggattaggcctttatcaagcaaatccttgatttccttttgacagtattgaagaagttcttcattcatttggattggtctggcttttgtgggaatttgtttttccctaaagtctttctcataagggagat

SEQ ID NO: 15991 - DNA, 1080 bp, Glycine max
  Gm_smallRNAprecursor_8824
gatgtttgaaatgttggtcaatgttttgggaaaagattaaaacatcatctatgtagacaatgacaaattttgaatagggattaaaaatatcgttcataattttttgaaattctgaaggggcattcttcagtccgaatggcatcacgttccattcgtattgctcgaaaggtacagtaaacgctgttttgtacctatctgattcttggatttggatttgccaaaatccagatttcatatcaaattttgaaaatatctttgcagaatttaatctgttaagcaaatcttttttgtttggaataggatatctaatccactgtaatgcttgatttagtggtttgtaatttatgactaagcggggtgttccacgctcaatctcagattgtttattgacataaaaagccgcacaagaccatgggcttttgcttttccggattaggcctttatcaagcaaatccttgatttccttttgacagtattgaagaagttcttcattcatttggattggtctggcttttgtgggaatttgtttttccctaaagtctttctcataagggagatcaacaatatgtttctttctgtcccaaaatgcatgtggcaattcagaacagacggtcgattcaatatgatttaataaagattgaattttttcttttacttggggttttcccagttgtatctgaatattattaaaagatacttcttcttttaagaaattaatttgattaatcttattttctataagatttatatttctggaaattggtttagtagaaaaattaaatataatttttcttcctaaataatttgtggttattccttcattagatatttggatgggaaacagggctctaatgaagggcgttcctaagattacttcattcttaaggttttttaccagaagaaagtttgtgttaatcttaagaccttggttttcaatgattgcatttgatagcttaaaattaatttttaattttgagtcgtttgccgtacttaatttttctgttcttaaacatccactttcatggccttgacatgaaagaaagatcaatcccaacagccttaatttataggatccagtac

SEQ ID NO: 15992 - DNA, 1168 bp, Glycine max
  Gm_smallRNAprecursor_8825
atggtcttgtgcggctttttatgtcaacaaacaatctgaaattgagcatggaacaccccgcttagtcataaattacaaaccactaaatcaagcattacaatgaattagatatcctattccaaacaaaaaatatttgcttaacagattaaattctgcaaagatattttcaaaatttgatatgaaatctggattttggcaaatccaaatccaagaatcagataggtacaaaacaacatttactgtacctttcgggcaatatgaatggaatgtgatgtcattcggattgaagaatgcccctttagaatttcaaaaaattatgaatgatatttttaatccctattcaaaatttgtcattgtctacatagatgatgttttaatcttttcccaaaacattgaccaacatttcaaacatctccagaccttcatccatatcatcaaacagaatggtttggcaatctcccaatcaaaaatcaatcttttccaaactcgaattcgattccttggtcacaatatatatcaaggtacaatcattccaatcgaaaggtcaatagagtttgctagcaaatttcccaaccaaatcttagacaaaacccagttacaaagatttctaggttgtctaaattacataggagaatttgtcccctatttaaacaatattgtcaagccattgcatgataggctgaagaaaaatccgcctccatggtctgacctccatacacaaacagttaaagaaatcaaagtcaaagtccaatccattaaatgtctgtatcttcccattccacaggcatttaaaattatcgaaactaatggttcagacataggttatggtggcatcctcaaacaaagagttcatggccaagaccatgtcattgcatatacatcaaaacattggaatcctgcacaattaaaatattcaactgttaaaaaagaagttttagcaattgttttgtgcatttccaaatttcaatcggatttattaaaccaaaaaattttaatcagggttgattgtaaatcagccaaagatattttacaaaaagatgttaaaaaccttgcctcaaaacaaatttttgcaagatggcaagcaattctaagtgtctttgattttgacatagaatacatcaagggcacctcaaactcattacctgactaccttacccgtgaattctta

SEQ ID NO: 15993 - DNA, 1128 bp, Glycine max
  Gm_smallRNAprecursor_8826
ctcacatgccccaataacattctcttcgttccgattcgttaaccgttagatcgccttgaaaattttactggaggttcctaatacagaaatctaaattttgaccgttgggatctgctagaaaatatctagaacacgagatgtactacctttcccgtgactagcaatgcacaaccatttttctacataataggcaaaatttgctgcacaatttaacagcatttttctgcatattgtagtagatttcgaattctagctttcttgtatccaatttcactcaaattggatcctacaagtcctaaaccatgtctaaatcatgttcaaaacaaaaaaaagcttcaaaccaaggtaatcaaaatataggtatccaaaacccatcaattttagtgaattctcaaggtttgataggtgaaaattaaaattgggtaattttggggtaaactctcatcttcatcaagtctataacattgatttagacttgctcaaactggttttaaggtgaaatctccacctattcaaaatttgacctctcaacacccaatttaccctagaaatgactcctttcttttacatttgtcactcatttttctcaattgctctgcccaagttttcctacaagtcctaattgacattttaaactaggatcaactcactatagactccaatttccactaaccccaaatttggcttttctcacccttaaaatctcacacttttccacctacaacactaccattctcacatttaaccctaagttaactctccccatcatctctaccagttttctaccaacatttcaagcatacatatatcacaaagcatcattattaaaccctaaatcaacatgggtagttttgttcacatcaaacatgtcaagtttagcatatttttagcaaattccttcacaaataactaccctaaggcaataacctagcagaactacccattatagctcccaaaaacccaacacccacaaatttcaagtgagaagaagtccacccttacctgaaatttgaagccccacgaagtagaggtaagctccaagactccgaaaatggcttttccttgtaatttggggtagaaaggaaaaggaatttggagcttcaatggaggcaacaatggtggagaaga

SEQ ID NO: 15994 - DNA, 1049 bp, Glycine max
  Gm_smallRNAprecursor_8827
gtttgaggtgcccttgatatattctatgtcaaaatcaaagacacttaaaattgcttgccatcttgcaaaaatttgttttgaggcaaggtttttaacatctttttgtaaaatatctttggctgacttacaatcaatccgaattaaaaatttttggtttaataaatctgattgaaatttggaaatgcacaaaacaattactaaaacttattttttaacagttgaatattttaattgtgcaggattccaatgttttgatgtatatgcaatgacatgttcttgaccatgtactctttgtttgaggatgccaccataacctatgtctgtgcatcggttttgacaattttaaatgcttgtgggataggaagatacagatattttatggattggaccctaagtttgatttctttaactgtttgcgtatggaggtcagaccagggaggcagatttttcttcagcctatcatgtaacggcttgacaatattgtttaaataggggacaaattctcctacataatttagacaacctaggaatctttttaactgggttttgtctaagatttggttgggaaatctgctagcaaactctattgacctttctattggattgattgttccttgatatatatggtgaccaaggaatccgattcgagtttggaagagatttatttttgatttggagactgccaaaccattctgtttgataatatggatgaaagtctggagatgtttgaaatgttggtcaatgttttgggaaaagattaaaacatcatctatgtagacaatgacaaattttgaatagggattaaaaatatcattcataattttttgaaactctgaaggggcattctttagtccgaatggcatcacattccattcgtattgcccgaaaagtacaataaacactgttttgtacctatctgactcttggatttggattgccaaaatccagatttcatgtcaaatttagaaaatatctttgcagaatttaatctgttaagtaaatcctttttgcttggaatagggtacctaattcattgtaatgcttggttc

SEQ ID NO: 15995 - DNA, 1049 bp, Glycine max; identical to SEQ ID NO: 15994
  Gm_smallRNAprecursor_8828

SEQ ID NO: 15996 - DNA, 1050 bp, Glycine max
  Gm_smallRNAprecursor_8829
gtttgaggtgcccttgatatattctatgtcaaaatcaaagacacttaaaattgcttgccatcttgcaaaaatttgttttgaggcaaggtttttaacatctttttgtaaaatatctttggctgacttacaatcaatccgaattaaaaatttttggtttaataaatctgattgaaatttggaaatgcacaaaacaattactaaaacttattttttaacagttgaatattttaattgtgcaggattccaatgttttgatgtatatgcaatgacatgttcttgaccatgtactctttgtttgaggatgccaccataacctatgtctgtgcatcggttttgacaattttaaatgcttgtgggataggaagatacagatattttatggattggaccctaagtttgatttctttaactgtttgcgtatggaggtcagaccagggaggcagatttttcttcagcctatcatgtaacggcttgacaatattgtttaaataggggacaaattctcctacataatttagacaacctaggaatctttttaactgggttttgtctaagatttggttgggaaatctgctagcaaactctattgacctttctattggattgattgttccttgatatatatggtgaccaaggaatccgattcgagtttggaagagatttatttttgatttggagactgccaaaccattctgtttgataatatggatgaaagtctggagatgtttgaaatgttggtcaatgttttgggaaaagattaaaacatcatctatgtagacaatgacaaattttgaatagggattaaaaatatcattcataattttttgaaactctgaaggggcattctttagtccgaatggcatcacattccattcgtattgcccgaaaagtacaataaacactgttttgtacctatctgactcttggatttggattgccaaaatccagatttcatgtcaaatttagaaaatatctttgcagaatttaatctgttaagtaaatcctttttgcttggaatagggtacctaattcattgtaatgcttggttca

SEQ ID NO: 15997 - DNA, 1050 bp, Glycine max; identical to SEQ ID NO: 15996
  Gm_smallRNAprecursor_8830

SEQ ID NO: 15998 - DNA, 1047 bp, Glycine max
  Gm_smallRNAprecursor_8831
tttgaggtgcccttgatatattctatgtcaaaatcaaagacacttaaaattgcttgccatcttgcaaaaatttgttttgaggcaaggtttttaacatctttttgtaaaatatctttggctgacttacaatcaatccgaattaaaaatttttggtttaataaatctgattgaaatttggaaatgcacaaaacaattactaaaacttattttttaacagttgaatattttaattgtgcaggattccaatgttttgatgtatatgcaatgacatgttcttgaccatgtactctttgtttgaggatgccaccataacctatgtctgtgcatcggttttgacaattttaaatgcttgtgggataggaagatacagatattttatggattggaccctaagtttgatttctttaactgtttgcgtatggaggtcagaccagggaggcagatttttcttcagcctatcatgtaacggcttgacaatattgtttaaataggggacaaattctcctacataatttagacaacctaggaatctttttaactgggttttgtctaagatttggttgggaaatctgctagcaaactctattgacctttctattggattgattgttccttgatatatatggtgaccaaggaatccgattcgagtttggaagagatttatttttgatttggagactgccaaaccattctgtttgataatatggatgaaagtctggagatgtttgaaatgttggtcaatgttttgggaaaagattaaaacatcatctatgtagacaatgacaaattttgaatagggattaaaaatatcattcataattttttgaaactctgaaggggcattctttagtccgaatggcatcacattccattcgtattgcccgaaaagtacaataaacactgttttgtacctatctgactcttggatttggattgccaaaatccagatttcatgtcaaatttagaaaatatctttgcagaatttaatctgttaagtaaatcctttttgcttggaatagggtacctaattcattgtaatgcttggtt

SEQ ID NO: 15999 - DNA, 1048 bp, Glycine max
  Gm_smallRNAprecursor_8832
tttgaggtgcccttgatatattctatgtcaaaatcaaagacacttaaaattgcttgccatcttgcaaaaatttgttttgaggcaaggtttttaacatctttttgtaaaatatctttggctgacttacaatcaatccgaattaaaaatttttggtttaataaatctgattgaaatttggaaatgcacaaaacaattactaaaacttattttttaacagttgaatattttaattgtgcaggattccaatgttttgatgtatatgcaatgacatgttcttgaccatgtactctttgtttgaggatgccaccataacctatgtctgtgcatcggttttgacaattttaaatgcttgtgggataggaagatacagatattttatggattggaccctaagtttgatttctttaactgtttgcgtatggaggtcagaccagggaggcagatttttcttcagcctatcatgtaacggcttgacaatattgtttaaataggggacaaattctcctacataatttagacaacctaggaatctttttaactgggttttgtctaagatttggttgggaaatctgctagcaaactctattgacctttctattggattgattgttccttgatatatatggtgaccaaggaatccgattcgagtttggaagagatttatttttgatttggagactgccaaaccattctgtttgataatatggatgaaagtctggagatgtttgaaatgttggtcaatgttttgggaaaagattaaaacatcatctatgtagacaatgacaaattttgaatagggattaaaaatatcattcataattttttgaaactctgaaggggcattctttagtccgaatggcatcacattccattcgtattgcccgaaaagtacaataaacactgttttgtacctatctgactcttggatttggattgccaaaatccagatttcatgtcaaatttagaaaatatctttgcagaatttaatctgttaagtaaatcctttttgcttggaatagggtacctaattcattgtaatgcttggttc

SEQ ID NO: 16000 - DNA, 1049 bp, Glycine max
  Gm_smallRNAprecursor_8833
tttgaggtgcccttgatatattctatgtcaaaatcaaagacacttaaaattgcttgccatcttgcaaaaatttgttttgaggcaaggtttttaacatctttttgtaaaatatctttggctgacttacaatcaatccgaattaaaaatttttggtttaataaatctgattgaaatttggaaatgcacaaaacaattactaaaacttattttttaacagttgaatattttaattgtgcaggattccaatgttttgatgtatatgcaatgacatgttcttgaccatgtactctttgtttgaggatgccaccataacctatgtctgtgcatcggttttgacaattttaaatgcttgtgggataggaagatacagatattttatggattggaccctaagtttgatttctttaactgtttgcgtatggaggtcagaccagggaggcagatttttcttcagcctatcatgtaacggcttgacaatattgtttaaataggggacaaattctcctacataatttagacaacctaggaatctttttaactgggttttgtctaagatttggttgggaaatctgctagcaaactctattgacctttctattggattgattgttccttgatatatatggtgaccaaggaatccgattcgagtttggaagagatttatttttgatttggagactgccaaaccattctgtttgataatatggatgaaagtctggagatgtttgaaatgttggtcaatgttttgggaaaagattaaaacatcatctatgtagacaatgacaaattttgaatagggattaaaaatatcattcataattttttgaaactctgaaggggcattctttagtccgaatggcatcacattccattcgtattgcccgaaaagtacaataaacactgttttgtacctatctgactcttggatttggattgccaaaatccagatttcatgtcaaatttagaaaatatctttgcagaatttaatctgttaagtaaatcctttttgcttggaatagggtacctaattcattgtaatgcttggttca

SEQ ID NO: 16001 - DNA, 1232 bp, Glycine max
  Gm_smallRNAprecursor_8834
aaattgcttgccatcttgcaaaaatttgttttgaggcaaggtttttaacatctttttgtaaaatatctttggctgacttacaatcaatccgaattaaaaatttttggtttaataaatctgattgaaatttggaaatgcacaaaacaattactaaaacttattttttaacagttgaatattttaattgtgcaggattccaatgttttgatgtatatgcaatgacatgttcttgaccatgtactctttgtttgaggatgccaccataacctatgtctgtgcatcggttttgacaattttaaatgcttgtgggataggaagatacagatattttatggattggaccctaagtttgatttctttaactgtttgcgtatggaggtcagaccagggaggcagatttttcttcagcctatcatgtaacggcttgacaatattgtttaaataggggacaaattctcctacataatttagacaacctaggaatctttttaactgggttttgtctaagatttggttgggaaatctgctagcaaactctattgacctttctattggattgattgttccttgatatatatggtgaccaaggaatccgattcgagtttggaagagatttatttttgatttggagactgccaaaccattctgtttgataatatggatgaaagtctggagatgtttgaaatgttggtcaatgttttgggaaaagattaaaacatcatctatgtagacaatgacaaattttgaatagggattaaaaatatcattcataattttttgaaactctgaaggggcattctttagtccgaatggcatcacattccattcgtattgcccgaaaagtacaataaacactgttttgtacctatctgactcttggatttggattgccaaaatccagatttcatgtcaaatttagaaaatatctttgcagaatttaatctgttaagtaaatcctttttgcttggaatagggtacctaattcattgtaatgcttggttcagtggtttgtaatttatgactaaacggggtgttccacgctcaagctcagaatgtttgttgacataaaaagccgcacaggaccacgggcttttgcttttccggattaaacctttatcaagcaaatcctgaatttccttttgacagtattgaaggagttcttcgttcatttgaattggtcaagcttttgtgggaatttgtttttccctaaagtctttctcataagggagatc

SEQ ID NO: 16002 - DNA, 1080 bp, Glycine max
  Gm_smallRNAprecursor_8835
ccatttttttttcaagtcatagtaggacacacctagttgctcatgaaccaaggaatttaaataaaacaagcacaagctcagaaggtagtcatacctcacaaatatatatatgttaacaaattggtccgtaatggacagataggatgtaagaatgcagtaatttaaagggtacagtaaacgctgttttgtacctatctgattcttggatttggatttgccaaaatccagatttcatatcaaattttgaaaatacctttgcagaatttaatctgttaagcaaatcttttttgtttggaatgggatatctaatccattgtaatgcttgatttagtggtttgtaatttatgactaagcggggtgttccatgctcaattttagattgtttgttgacataaaaagccgcacaagaccatgggctcttacttttccggattaggcctttatcaagcaaatccttgatttccttttgacagtattgaagaagttcttcattcatttggattggtctggcttttgtgggaatttgtttttccctaaagtctttctcataggggagatcaacaatatgtttctttctgtcccaaaatgcatgtggcaattcagaacagacgattgattcaatatgatttaataaagattgaatttttttcttttacttggggttttcctagttgtatctgaatattattaaaagatacttcttcttttaagaagttaatttgattaatcttattttctataagatttatatttctggaaattggtttagttgaaaaattaaatataatctttcttcctaaataatttgtggttattccttcattagatatttggatgggaaacagggctctaatgaagggcgttcctaagattacttcattcttaaggttttttaccagaagaaagtttgtgttaatcctaagcccttggtttccaatgattgcatttgatagcttaaaattaatttttaattttgatccatttgccgtacttaatttttctgaggttttctccaagaattttgtaggaattaatccttctaaaatgcagtttgaatcagcccctgtgtcaaataaggcc

SEQ ID NO: 16003 - DNA, 1138 bp, Glycine max
  Gm_smallRNAprecursor_8836
cacaccgaaacgacttacaaacccaggttttcgaaaacaaagaaaccgaagcggcggcagagccgcacaggatcggtgaggggagaagggagatatgaaaaacggaacttgaaatttattgaaaccgaaagaaaagcttacaaagagtttttccctaggtagagcttctctctctaaaatcctgattctgagactatctgaaagggtgcctcacaaagggaacgaggactcctttaaatagaatcaatttttactgtttctacagtgtcggtaatgtttaccagaactgttacaaaacttttacaaattacatcacttaaaaaatacttacaaattagttacaataattcatgattattacaactaattaatcgtcatctaacgatataccaaaacaatcatcttcattctggtagaatggatcgtcttcttggtcatcattagtctcagatgattctgcttccttcttggaaggttcttcttctacttcctgttgaagtagttggagaacttctttgagattctgagcaagactctctttagattttgagcttgctaagaattctgccagttgcgacttctgattcagaaacaaagaggtctccggatcagcaggtttgaggaactcaggattgctctggaaccagttcttgacttgatctggagcagccttcgaagtatcgaattgtgaccaccattttacaaaggcgtgtctctgtaacggtggatattgcttgctgttttcagtttttccgtatctgtattaccatgaaaaaatccatgacaaggcgaaactggaaaaatactttaaatctgctggaatacgtgattccttgctattatagagcttgttgaattgttggaatccctgttggacttcttctggaaatatttgtggaattggtccgaagtagttccaccattggaggaaccaatttggaaaattatacacagtattatttttgaagtaaattagccatgaatgcttgaatttactattttgatgccagaacacattggtccaggcgtcgatgtaatcccaataattatatcctgcgaggtcaaatggagcagaaaattttttgggttggtttaagtttgagccataatgtcgtggctgcataacctttaggatttg

SEQ ID NO: 16004 - DNA, 1198 bp, Glycine max
  Gm_smallRNAprecursor_8837
aagaaaagcttacaaagagtttttccctaggtagagcttctctctctaaaatcctgattctgagactatctgaaagggtgcctcacaaagggaacgaggactcctttaaatagaatcaatttttactgtttctacagtgtcggtaatgtttaccagaactgttacaaaacttttacaaattacatcacttaaaaaatacttacaaattagttacaataattcatgattattacaactaattaatcgtcatctaacgatataccaaaacaatcatcttcattctggtagaatggatcgtcttcttggtcatcattagtctcagatgattctgcttccttcttggaaggttcttcttctacttcctgttgaagtagttggagaacttctttgagattctgagcaagactctctttagattttgagcttgctaagaattctgccagttgcgacttctgattcagaaacaaagaggtctccggatcagcaggtttgaggaactcaggattgctctggaaccagttcttgacttgatctggagcagccttcgaagtatcgaattgtgaccaccattttacaaaggcgtgtctctgtaacggtggatattgcttgctgttttcagtttttccgtatctgtattaccatgaaaaaatccatgacaaggcgaaactggaaaaatactttaaatctgctggaatacgtgattccttgctattatagagcttgttgaattgttggaatccctgttggacttcttctggaaatatttgtggaattggtccgaagtagttccaccattggaggaaccaatttggaaaattatacacagtattatttttgaagtaaattagccatgaatgcttgaatttactattttgatgccagaacacattggtccaggcgtcgatgtaatcccaataattatatcctgcgaggtcaaatggagcagaaaattttttgggttggtttaagtttgagccataatgtcgtggctgcataacctttaggatttggattgtggaatgagtatttagatttggatctttggggtctttgaaatgtttaatagatactgagtttgtatctattagaatgaattcatagaatttgcgggttttgtttgtggctattggcctgtaatggaatcccggagggaatactttggcggttgctttgaaaggattcttgtcccagtattccg

SEQ ID NO: 16005 - DNA, 1109 bp, Glycine max
  Gm_smallRNAprecursor_8838
aaatacttacaaattagttacaataattcatgattattacaactaattaatcgtcatctaacgatataccaaaacaatcatcttcattctggtagaatggatcgtcttcttggtcatcattagtctcagatgattctgcttccttcttggaaggttcttcttctacttcctgttgaagtagttggagaacttctttgagattctgagcaagactctctttagattttgagcttgctaagaattctgccagttgcgacttctgattcagaaacaaagaggtctccggatcagcaggtttgaggaactcaggattgctctggaaccagttcttgacttgatctggagcagccttcgaagtatcgaattgtgaccaccattttacaaaggcgtgtctctgtaacggtggatattgcttgctgttttcagtttttccgtatctgtattaccatgaaaaaatccatgacaaggcgaaactggaaaaatactttaaatctgctggaatacgtgattccttgctattatagagcttgttgaattgttggaatccctgttggacttcttctggaaatatttgtggaattggtccgaagtagttccaccattggaggaaccaatttggaaaattatacacagtattatttttgaagtaaattagccatgaatgcttgaatttactattttgatgccagaacacattggtccaggcgtcgatgtaatcccaataattatatcctgcgaggtcaaatggagcagaaaattttttgggttggtttaagtttgagccataatgtcgtggctgcataacctttaggatttggattgtggaatgagtatttagatttggatctttggggtctttgaaatgtttaatagatactgagtttgtatctattagaatgaattcatagaatttgcgggttttgtttgtggctattggcctgtaatggaatcccggagggaatactttggcggttgctttgaaaggattcttgtcccagtattccggttccatttgtaaaacattgaaaaatttgttttttgaaatataactgttgttgggttgtggtgttgattcttgttgagtcaacaattggcttggtttttggtta

SEQ ID NO: 16006 - DNA, 1070 bp, Glycine max
  Gm_smallRNAprecursor_8839
caactaattaatcgtcatctaacgatataccaaaacaatcatcttcattctggtagaatggatcgtcttcttggtcatcattagtctcagatgattctgcttccttcttggaaggttcttcttctacttcctgttgaagtagttggagaacttctttgagattctgagcaagactctctttagattttgagcttgctaagaattctgccagttgcgacttctgattcagaaacaaagaggtctccggatcagcaggtttgaggaactcaggattgctctggaaccagttcttgacttgatctggagcagccttcgaagtatcgaattgtgaccaccattttacaaaggcgtgtctctgtaacggtggatattgcttgctgttttcagtttttccgtatctgtattaccatgaaaaaatccatgacaaggcgaaactggaaaaatactttaaatctgctggaatacgtgattccttgctattatagagcttgttgaattgttggaatccctgttggacttcttctggaaatatttgtggaattggtccgaagtagttccaccattggaggaaccaatttggaaaattatacacagtattatttttgaagtaaattagccatgaatgcttgaatttactattttgatgccagaacacattggtccaggcgtcgatgtaatcccaataattatatcctgcgaggtcaaatggagcagaaaattttttgggttggtttaagtttgagccataatgtcgtggctgcataacctttaggatttggattgtggaatgagtatttagatttggatctttggggtctttgaaatgtttaatagatactgagtttgtatctattagaatgaattcatagaatttgcgggttttgtttgtggctattggcctgtaatggaatcccggagggaatactttggcggttgctttgaaaggattcttgtcccagtattccggttccatttgtaaaacattgaaaaatttgttttttgaaatataactgttgttgggttgtggtgttgattcttgttgagtcaacaattggcttggtttttggtta

SEQ ID NO: 16007 - DNA, 1038 bp, Glycine max
  Gm_smallRNAprecursor_8840
cccagaagatgttgtagttgcctttttggttattggctctggtagagccagtagaacctcttttccttttgtactggatcttcctcctctgccggaggaactagacaccttaggaggcatcgggaattttctgtaaaaattcacgggtgaggtagtcaggtagagagttggaagagcccttgatatattctatattaaaatgaaagacacttaaaattgcttgccatcttgcaaaaatctattttgaggcaaggttttttacatccttctgtaaaatgtctttggctgatttgcagtcaacccttactaaaaatttttgatttaataaatcagattgaaatttggaaatgcacaaaacaattgctaaaacttcttttttgacagttgaatactttaattgtgcaggattccagtgttttgaagtatatgcaatgacatgttcttgaccatgtacttgttgtttgaggatgccaccgtaaccgatgtctgatgcatcagtttcgacaattttgaatgcctgtggaatgggaagatacagacattttatggattggactttgactttgatttctttaactgtttgggtatgtaggtcagaccaaggaggcggatttttctttagcctatcatgcaatggtttaacaatattgtttaagtaggggacaaattctcctacgtaatttagacagcctagaaatctttgtaactgggttttgtctaagatttggttggggaatttgctagcaaactctattgacctttcgattggaatgattgtaccttgataaatattgtgaccaaggaatcgaattcgagtttggaaaggattaatttttgattcggagactgccaaaccattttgtttgataatatggatgaaggtttggagatgtttgaaatgttggtcaatgttttgggaaaagattaaaacatcatctatgtagacaatgacaaattttgaatagggattaaaaatgtcattcataattttttgaaattctgaaggggcattcttcagtccgaattcataatttttta

SEQ ID NO: 16008 - DNA, 1196 bp, Glycine max
  Gm_smallRNAprecursor_8841
aaggttttttacatccttctgtaaaatgtctttggctgatttgcagtcaacccttactaaaaatttttgatttaataaatcagattgaaatttggaaatgcacaaaacaattgctaaaacttcttttttgacagttgaatactttaattgtgcaggattccagtgttttgaagtatatgcaatgacatgttcttgaccatgtacttgttgtttgaggatgccaccgtaaccgatgtctgatgcatcagtttcgacaattttgaatgcctgtggaatgggaagatacagacattttatggattggactttgactttgatttctttaactgtttgggtatgtaggtcagaccaaggaggcggatttttctttagcctatcatgcaatggtttaacaatattgtttaagtaggggacaaattctcctacgtaatttagacagcctagaaatctttgtaactgggttttgtctaagatttggttggggaatttgctagcaaactctattgacctttcgattggaatgattgtaccttgataaatattgtgaccaaggaatcgaattcgagtttggaaaggattaatttttgattcggagactgccaaaccattttgtttgataatatggatgaaggtttggagatgtttgaaatgttggtcaatgttttgggaaaagattaaaacatcatctatgtagacaatgacaaattttgaatagggattaaaaatgtcattcataattttttgaaattctgaaggggcattcttcagtccgaattcataattttttaaaaatgacaagcattttttggtggctataggattgccgttcaaactgtttttcaaaaaaaaaaaaagagtttttcttaaaaataattcagatccagaaaaattttgtgacatatttacttacggagatatttctatggaaccaaatgagggcaaagatattagagaatattataatcatgtctagactattacgatctttttcccgtatctcttttcgctcaaactcctcctcatcatcttcctcaagaaactccaatttattaaatgatcatgacaaccagacccaagaggtcgccccaaaacacaatctcttcgataaggaagtccgattcgaagatatcaatcaaaacatggatgactggaacattccagaaatccctcaggatcaactatacgttcctgaaaca

SEQ ID NO: 16009 - DNA, 1197 bp, Glycine max
  Gm_smallRNAprecursor_8842
tctttgtaactgggttttgtctaagatttggttggggaatttgctagcaaactctattgacctttcgattggaatgattgtaccttgataaatattgtgaccaaggaatcgaattcgagtttggaaaggattaatttttgattcggagactgccaaaccattttgtttgataatatggatgaaggtttggagatgtttgaaatgttggtcaatgttttgggaaaagattaaaacatcatctatgtagacaatgacaaattttgaatagggattaaaaatgtcattcataattttttgaaattctgaaggggcattcttcagtccgaattcataattttttaaaaatgacaagcattttttggtggctataggattgccgttcaaactgtttttcaaaaaaaaaaaaagagtttttcttaaaaataattcagatccagaaaaattttgtgacatatttacttacggagatatttctatggaaccaaatgagggcaaagatattagagaatattataatcatgtctagactattacgatctttttcccgtatctcttttcgctcaaactcctcctcatcatcttcctcaagaaactccaatttattaaatgatcatgacaaccagacccaagaggtcgccccaaaacacaatctcttcgataaggaagtccgattcgaagatatcaatcaaaacatggatgactggaacattccagaaatccctcaggatcaactatacgttcctgaaacaataaaggacaaacacaactttgattatataatcaaaacagtagaaaacaatattcctctaggacaagatgtaggggaagaatttcatttactttcaaaaaattcaatttatgaacatagccgtaagtataaatatctacacatcggttgtgtacaagtagccatcaagcccttaattgatatgggcatagatgcagcagttttaatgtgtctaagagacattaggcataatcaatttgaagactccctaattggaacagtcgaaaccagcctaggacaaggtccaatatattttaactgttatccaaacaaaacagtgagtctgatagacataaacattcttgactctctgttcttaaacatccactttcatggccttgacatgaaagaaggatcaatcccagcagccttaatatataggatccagtacaaggtcatgaatacttgtg

SEQ ID NO: 16010 - DNA, 1047 bp, Glycine max
  Gm_smallRNAprecursor_8843
aagcattttttggtggctataggattgccgttcaaactgtttttcaaaaaaaaaaaaagagtttttcttaaaaataattcagatccagaaaaattttgtgacatatttacttacggagatatttctatggaaccaaatgagggcaaagatattagagaatattataatcatgtctagactattacgatctttttcccgtatctcttttcgctcaaactcctcctcatcatcttcctcaagaaactccaatttattaaatgatcatgacaaccagacccaagaggtcgccccaaaacacaatctcttcgataaggaagtccgattcgaagatatcaatcaaaacatggatgactggaacattccagaaatccctcaggatcaactatacgttcctgaaacaataaaggacaaacacaactttgattatataatcaaaacagtagaaaacaatattcctctaggacaagatgtaggggaagaatttcatttactttcaaaaaattcaatttatgaacatagccgtaagtataaatatctacacatcggttgtgtacaagtagccatcaagcccttaattgatatgggcatagatgcagcagttttaatgtgtctaagagacattaggcataatcaatttgaagactccctaattggaacagtcgaaaccagcctaggacaaggtccaatatattttaactgttatccaaacaaaacagtgagtctgatagacataaacattcttgactctctgttcttaaacatccactttcatggccttgacatgaaagaaggatcaatcccagcagccttaatatataggatccagtacaaggtcatgaatacttgtgcatctagagtcctattaaaacctcaaaaaggagaaacaactttgtttatcactgatatgacgaaggctaacgtttctcttccgagaaaaataaaatgggatgaagtaactcttcccgaaagatgggttatggataaggcaacaccgtctattccccgacccgctccaaccatagagcatattaagcaagataactccgg

SEQ ID NO: 16011 - DNA, 1080 bp, Glycine max
  Gm_smallRNAprecursor_8844
tcaaataacaagcagaaatttaaagggtactaggttgcctcctactagcacttctttaacgtcttgagctggacgcgtgatgacttgtcggtcacggacctagtacttttgcttaccattttgtttgataatatggatgaaggtttggagatgtttgaaatgttggtcaatgatttgggaaaagattaaaacatcatctatgtagacaatgacaaattttgaatagggataaaaaatgtcattcataattttttgaaattctgaaggggcattcttcagtccgaatggcattacattccattcatattgccttcagaatttcaaaaaattatgaatgacatttttaatccctattcaaaatttgtcattgtctacatagatgatgttttaatcttttcccaaaacattgaccaacatttcaaacatctccaaaccttcatccatattatcaaaccaaatggtttggcagtctccaaatcaaaaattaatcttttccaaactcgaattcgattccttggtcacaatatttatcaaggtacaatcattccaattgaaaggtcaatagagtttgctagcaaattccccaaccaaatcttagacaaaacccagttacaaagatttctaggctgtctaaattacgtaggagaatttgtcccctacttaaacaatattgtcaaaccattgcatgataggctaaagaaaaatccgcctccttggtctgacctacatacccaaacagttaaagaaatcaaagtcaaagtccaatccataaaatgtctgtatcttcccattccacaggcattcaaaattgtcaaaattgatgcatcagacatcggttacggtggcatcctcaaacaacaagtacatggtcaagaacatgtcattgcatatacttcaaaacactggaatcctgcacaattaaagtattcaactgtcaaaaaagaagttttagcaattgttttgtgcatttccaaatttcaatctgatttattaaatcaaaaatttttagtaagggttgactgcaaatcagccaaagacattttacagaaggatgtaaaaaaccttgcctcaaaacagatt

SEQ ID NO: 16012 - DNA, 1092 bp, Glycine max
  Gm_smallRNAprecursor_8845
ttttacttgcagtgcttcaggatgtgaaagaaattggagtgtgtttgagcaagtaattgtgacaaaactctaactatactttttaattttatttaattttgatgatcaagttttatttgaagtatatttgagattgaaatcaacatttatttgttatgttgtagattcattccaaaaaaagaaataggcttgagcacaagaggttgcatgatttggtgtttgtcaaatacaaccaacaattgaagcaaagatataatgcaagagatgaaattgatccaatttctcttaatgatattgatgtgtgaaatgaatggctcgtgggagagatggatcaagatgatgataatgatgctggaaatgatttggtatttgaagatgatgatgctttaaattgggcaactgtgtatcaggctttgggggttggagagtgtaggacgtatactaggcgaaaaagcaaaagacaacaagtgttgctgctgcccaaacttctaaaaaacaggcaatggttgttggatcttcatcaaggaagcaaaaagcagtccaagaaaatgatgaggatctagattttgaggagaatactgatcttgaatctgaagaagaagaaatcatggtcaattttgaggcgtctaatggggaagagggagagggagatgctccattaccatatgataacaacgaagatgattatgatggaattggagatgattagagcttcaaccttcactttgcactttgcattatgtttttatcattttcttattttgaactctttaatgagtttatttggtgttggtacttgattattgtatgaactcatgaaacttttttagtttatttgaatgcaatcctttgtttttttcaatttcaatgagtttatatatatgtatatttttttttttgtccgccatgacatccgctggcaaattgaccaaagcgggttccttttagaaacttattcccaaaaggggtctgtttcgaaacttttttcggagggggtcagtttttggagggatttcgccagtggagttggcgagttggacacgtggcagcagctgggggaactcgccagtggagatgacaagacacggtcca

SEQ ID NO: 16013 - DNA, 1092 bp, Glycine max; identical to SEQ ID NO: 16012
  Gm_smallRNAprecursor_8846

SEQ ID NO: 16014 - DNA, 1037 bp, Glycine max
  Gm_smallRNAprecursor_8847
ttagtggggcaggcacttaacaccttccttgcttggccaacacatcttgtgaagcgtttatcagaacaggtattttactctgattatatgtttatttttttcaattaatttgttcactgtaatcaaaacttgctaattaactatgttttatcaacaggcagctgtgtctccagcaaaacctccagaaagcccagatgaagaggtcgatgatcccctgtacctgatgacattgaccatcccacaactatttttgaagccgctccaggttatgtgggatgctaccatattcggggtgtttaatcaaaacttcccattgtatataaagcacgaagatctctctgaaattgcacacggtggtcaatgtctcagcatatctgttatacagttgtggattttgtaagtcattttagattactattaattaccaaagtaattgttttaaattcatacataattaactttgacttaacaacacaaccatctgactgagacaagtgtgcgagcggggaattctgatgtgtatggattcctcgagccacagtccattcagagatctgggcaatcacaatttgaatccgaaagttacatcaagagttggatacagagttcaaaacgagatgcttaccttggagcctatctgaatgggtaagtcaaacacaataattgaatttaaataatctatactactacaataacccatattcgtctctactgtagcggacactggcaaatggtcgtcattctgcctaaggaaaacctagttgtctggttttgttctttacataacaggctagacaactacctttagggaataattaacaggtcagtattgttttcaatacattttcattggcataactcaacaacatcaatattttaatgttcctcatattcaacactagtgctttgaaaggacttgatgatactccacaaccgaaatccaaggctgctgctaggtggattgttgttaaggtacgtgatttaaataaaagttctacttatatatattttatgtgtgtgtacactaattgtagtta

SEQ ID NO: 16015 - DNA, 1126 bp, Glycine max
  Gm_smallRNAprecursor_8848
tacctttccggagttatcttgcttaatatgctctatggttggagcgggtcggggaatagatggtgttgccttatccataacccatctttcgggaagagttacttcatcccattttatttttctcggaagagaaatgttagccttcgtcatatcaatgataaacaaagttgtttctcctttttgaggttttaataggactctagatgcacaagtattcatgaccttgtactggatcctatatattaaggctgctgggattgatccttctttcatgtcaaggccatgaaagtggatgtttaagaacagagagtcaagaatgtttctgtccatcagactcactgttttatttggataacaattaaaatatattggaccttgtcctaggctggtttcggctgttccacaaaagccagaccaatccaaatgaatgaagaacttcttcaatactgtcaaaaggaaatcaaggatttgcttgataaaggcctaatccggaaaagcaaaagcccatggtcttgtgcggctttttatgtcaacaaacaatctgagattgagcgcggaacaccccgcttagtcataaattacaaaccactaaatcaagcattacaatggattagatatcctattccaaacaaaaaagatttgcttaacagattaaattctgcaaagatattttcaaaatttgatatgaaatctggattttggcaaatccaaatccaagaatcagataggtacaaaatagcgtttactgtacctttcgggcaatatgaatggaatgtaatgccattcggactgaagaatgcccctttagaatttcaaaaaattatgaatgatattttaaatccctattcaaaatttgtcattgtctacatagatgatgttttaatcttttcccaaaacattgaccagcatttcaaacatctccaaaccttcatccatatcatcaaacaaaatggtttggcagtctccaaatcaaaaatcaatcttttccaaacacgaattcgattccttggtcacaatatttatcaaggtacaattgttccaatcgaaaggtcaattgagtttgctagcaaattccccaaccaaatcttagacaaaacccagttacaaagatttctaggttgtctaa

SEQ ID NO: 16016 - DNA, 1231 bp, Glycine max
  Gm_smallRNAprecursor_8849
taaatacccattccacaatccaaatcttgaaggtgattcagccacgacattatggctcaaacttaaaccaacccaaaaaattctctgcaccatttgaccctgcaggatataattattgggattacattgacgcctggaccaatgtgttctggcatcaaaatagtaaattcaagcattcatggctgatttacttcaaaaataatactgcatataattttccaaattggttcctccaatggtggaactatttcggaccaattccacaaatacttccagaagaagtccaacagggattcgaacaattcaataagctctataatagcaaggaatcacgtattccgacagatttaaagtacttttccagttttgccttgtcatggatcttttcatggcaatacagatacggaaaaactgaaaacaacaagcaatatccaccgttacagagacacgcctttgtaaaatggtggtcacaatttgatacttcaaaggctgctccagatcaagtcaagaactggttccagagcaatcctgagttccttaaacctgctgatccggagacatctttgtttctaaatcagaagtcgcaactggcagcattcttagcaagctcaaaatctaaagagagtcttgctcagaatctcaaagaagttctccaactacttcaacaggaagtggaagaagaaccttccaagaaggaagctgaatcatccgagactaatgatgaccaagaagatgatccattctaccagaatgaagatgaatgttttggtatatcattggacgacgattaattagttgtagtaatcatgaattattgtaactaatttgacagtttcttttaaataatgtaatttgtaaaagttttgtaacggtcccggtaaacattaccgatactgtagaaacagtaaaaattgggtctatttaaaggagtccccgtcccctttgtgaggcaccctttcagatagtcccagaatcaggtttttagagagagaagctctgcctagggaaaaactctttgtaagcttttctttcggttttaataaatttcaagttctatttttcatatctcccttctcccctcaccgatcctgtgcggctctgccgccgcttcggtttctttgttttcaaaaacctgggtttgtaagccgtttcggtgtgcccttgatatctgctttacaagtttataattcttattcttgattatcatactgcattcttacttcctatctgt

SEQ ID NO: 16017 - DNA, 1124 bp, Glycine max
  Gm_smallRNAprecursor_8850
attccacaatccaaatcttgaaggtgattcagccacgacattatggctcaaacttaaaccaacccaaaaaattctctgcaccatttgaccctgcaggatataattattgggattacattgacgcctggaccaatgtgttctggcatcaaaatagtaaattcaagcattcatggctgatttacttcaaaaataatactgcatataattttccaaattggttcctccaatggtggaactatttcggaccaattccacaaatacttccagaagaagtccaacagggattcgaacaattcaataagctctataatagcaaggaatcacgtattccgacagatttaaagtacttttccagttttgccttgtcatggatcttttcatggcaatacagatacggaaaaactgaaaacaacaagcaatatccaccgttacagagacacgcctttgtaaaatggtggtcacaatttgatacttcaaaggctgctccagatcaagtcaagaactggttccagagcaatcctgagttccttaaacctgctgatccggagacatctttgtttctaaatcagaagtcgcaactggcagcattcttagcaagctcaaaatctaaagagagtcttgctcagaatctcaaagaagttctccaactacttcaacaggaagtggaagaagaaccttccaagaaggaagctgaatcatccgagactaatgatgaccaagaagatgatccattctaccagaatgaagatgaatgttttggtatatcattggacgacgattaattagttgtagtaatcatgaattattgtaactaatttgacagtttcttttaaataatgtaatttgtaaaagttttgtaacggtcccggtaaacattaccgatactgtagaaacagtaaaaattgggtctatttaaaggagtccccgtcccctttgtgaggcaccctttcagatagtcccagaatcaggtttttagagagagaagctctgcctagggaaaaactctttgtaagcttttctttcggttttaataaatttcaagttctatttttcatatctcccttctcccctcaccgatcctgtgcggctctgccgccgcttcggtttctttgttttcaaaaacc

SEQ ID NO: 16018 - DNA, 1123 bp, Glycine max
  Gm_smallRNAprecursor_8851
ttccacaatccaaatcttgaaggtgattcagccacgacattatggctcaaacttaaaccaacccaaaaaattctctgcaccatttgaccctgcaggatataattattgggattacattgacgcctggaccaatgtgttctggcatcaaaatagtaaattcaagcattcatggctgatttacttcaaaaataatactgcatataattttccaaattggttcctccaatggtggaactatttcggaccaattccacaaatacttccagaagaagtccaacagggattcgaacaattcaataagctctataatagcaaggaatcacgtattccgacagatttaaagtacttttccagttttgccttgtcatggatcttttcatggcaatacagatacggaaaaactgaaaacaacaagcaatatccaccgttacagagacacgcctttgtaaaatggtggtcacaatttgatacttcaaaggctgctccagatcaagtcaagaactggttccagagcaatcctgagttccttaaacctgctgatccggagacatctttgtttctaaatcagaagtcgcaactggcagcattcttagcaagctcaaaatctaaagagagtcttgctcagaatctcaaagaagttctccaactacttcaacaggaagtggaagaagaaccttccaagaaggaagctgaatcatccgagactaatgatgaccaagaagatgatccattctaccagaatgaagatgaatgttttggtatatcattggacgacgattaattagttgtagtaatcatgaattattgtaactaatttgacagtttcttttaaataatgtaatttgtaaaagttttgtaacggtcccggtaaacattaccgatactgtagaaacagtaaaaattgggtctatttaaaggagtccccgtcccctttgtgaggcaccctttcagatagtcccagaatcaggtttttagagagagaagctctgcctagggaaaaactctttgtaagcttttctttcggttttaataaatttcaagttctatttttcatatctcccttctcccctcaccgatcctgtgcggctctgccgccgcttcggtttctttgttttcaaaaacc

SEQ ID NO: 16019 - DNA, 1039 bp, Glycine max
  Gm_smallRNAprecursor_8852
agcaatcaaagaatacaacatcagaaatcattttgattgcagaacaatttactctgaccaaagaaggctacacttcgtctgcaagttacatgaaaatggttgtacatggagcttgtgcgcatgcaattcaaagaggcataacaaatggattatcaagagtattagaggtcatcacacttgtcttgtgccgatgctcagacaagatcatcgccaactcgacaaacacatcatagcacagatcatccaaccaattgtcaaaacaaacctaactatctccatcaagacattgattgcagagatcaaaacattcatgaattataccccatcctacaagaagacatggttagcaaagcaaaaagcattggagatgattcatggaaactgggaagaatcatatgcctaactgccaaaacttttcggagctttgaaatcttgtgttcccggaactgtggtcgctgctcaaacagaatccttgtatgaggggggagaaatagtaccgggcaaaagattgtttaaacgtgtcttttggtcatttggtccatgcattaatggttttgcatattgcaaacccattgtacaagtagatggtacatggctttacagaaagtatactggcacactgttgatagctaccgcacaagatggagctaaccatatcttcccgattgcctatgccattgtagaaggggagacaattcagcttgggggttttttctaaagaatttgagaagacatgttactccgcaaattagcatttctcttatttcagaccgacatccctcaattataagtgcctacaacaacccaagtaacttatgggtacaggacacatcccatttcttttgcctgcgccacattgcacaaaactttcttcgtggtaactcaaactgcaaacatttaaagaaaccacttatgttggctggtgagaatctattttatttattcgttataattttctttcaatcaaattttataacataatacattgattaaatatttacagggtacgcatacacggagaagatgcactggcgacatc

SEQ ID NO: 16020 - DNA, 1051 bp, Glycine max
  Gm_smallRNAprecursor_8853
actggcgacatcttggggatattcgtgcgaataagccaagtgcaactgaatggcttgatcaattacccaaacaaaaatgggtacaatgctttgatgaggggaaatgttggggacatatgactaccaatttgtcggagtctgttaattccatgttaaaaaacacaagacatttgccggtatcatcattggttgaggagacctatttcaagaccgcacaactctttgctaatagaggtcgacaaactcaggcaatgatcaactccggctcacagtattctgaagtcatcttcgatgcaatcaatagtggtcaacaagaatctaatacacacattgtaaatgatttcgacagacacaatcacacttttattataaccgagactcaatccccacttgaaacacccagaccacctggaaggtttagagtaatgttacaatcccaaaagtgtgattgtggtgaatttcaggctaaacatttaccgtgttctcacgtcatggctgcctgtaaatctgtcaatgttgatcccatgacctatgtgccaatgatattcactttacaacacattttgcacatctacgacaactcctttggtttattgccacacgaatcaatgtggcaagaatatgaaggagatcagtggggtcctgatccaaggagaaagaggactgcaaagggtcgtcccgtttcaactcgcattcctactgagatggacgaagacgaaaatgaacgagcaagtagaaaaaaatgtgaactttgccggcaacatggtcatagcagaaataattgtcctaatgtatcatcatcttagtttttccttagacaaatgtcattgtttaaatattttattgatgacgtagtataatgttcttatataaataaattgttaaaagctttagttttatcatttttaattaaatctaataacataaacaaactaattatatttagtaaaatagttaaattaaaaattttaaaattcagattattatacaaaataaatatttactaaaataaatatattattatacaaaattcagattttaaaacatatat

SEQ ID NO: 16021 - DNA, 1052 bp, Glycine max
  Gm_smallRNAprecursor_8854
actggcgacatcttggggatattcgtgcgaataagccaagtgcaactgaatggcttgatcaattacccaaacaaaaatgggtacaatgctttgatgaggggaaatgttggggacatatgactaccaatttgtcggagtctgttaattccatgttaaaaaacacaagacatttgccggtatcatcattggttgaggagacctatttcaagaccgcacaactctttgctaatagaggtcgacaaactcaggcaatgatcaactccggctcacagtattctgaagtcatcttcgatgcaatcaatagtggtcaacaagaatctaatacacacattgtaaatgatttcgacagacacaatcacacttttattataaccgagactcaatccccacttgaaacacccagaccacctggaaggtttagagtaatgttacaatcccaaaagtgtgattgtggtgaatttcaggctaaacatttaccgtgttctcacgtcatggctgcctgtaaatctgtcaatgttgatcccatgacctatgtgccaatgatattcactttacaacacattttgcacatctacgacaactcctttggtttattgccacacgaatcaatgtggcaagaatatgaaggagatcagtggggtcctgatccaaggagaaagaggactgcaaagggtcgtcccgtttcaactcgcattcctactgagatggacgaagacgaaaatgaacgagcaagtagaaaaaaatgtgaactttgccggcaacatggtcatagcagaaataattgtcctaatgtatcatcatcttagtttttccttagacaaatgtcattgtttaaatattttattgatgacgtagtataatgttcttatataaataaattgttaaaagctttagttttatcatttttaattaaatctaataacataaacaaactaattatatttagtaaaatagttaaattaaaaattttaaaattcagattattatacaaaataaatatttactaaaataaatatattattatacaaaattcagattttaaaacatatatt

SEQ ID NO: 16022 - DNA, 1131 bp, Glycine max
  Gm_smallRNAprecursor_8855
gcgtagcggaaaatggcggatgtcatggcggacaaaaaaaaaaaaacatatatataaactcattgaaattgaaaaaaacaaaggattgcattcaaatacactaaaaaagtttcatgagttcatacaataatcaagtaccaacaccacataaactcattaaagagttcaaaataagaaaatgataaaaacataatgcaaagtgcaaagtgaggctctaatcatcttctccaatcccaacataatcatcttcgttgttatcatatggtaatgaagcatctccctctccctcttccccatcagacgcctcaaaattgaccatgatttcttcttcttcagattcaacatcaatatttttctcaacatctagatcctcatcattttcttggactgctttttgcttccttgatgaagatccaacaaccattgcctgttttttagaagtttgggcagcagcaacacttgttttttgctttttccgcctagtatacatcctacactctccaacccccgaagcctgatacacagttgcccaatttagagcatcatcatcttcaaataccaaatcatttccagcatcattatcatcatcttgatccatctctcccacgagccattcattgcatacatcaatatcattaagagaaattggatcaatttcatctcttgcattatatcttggcttcaattgttggttgtatttgacaaacaccaaatcatgcaacctcttgtgctcaagcctatttctttttttggaatgaatctacaacataacaaataaatgttgatttcaatctcaaatatactccaaataaaacttgatcatcaaaattaaataaaattaaaaagtatagttagagttttgtcacaattacttgctcaaacacactccaatttctttcacatcctaaagcactgcaagttaaactcaaaatcttaatagctagcttctgcaaatttggagtttgtgacccaaacattcgccaccaatatgctgcaataccaattaccaaccaagagcataacttagaattctgaattataacactaatacataaaaaaaatagtatgataaaagtttcttactaggagaatgggttttcctttgagccattgcaaagtcggaaccaaagt

SEQ ID NO: 16023 - DNA, 1132 bp, Glycine max
  Gm_smallRNAprecursor_8856
ttacaagattggtgctgaccactttggttccgactttgcaatggctcaaaggaaaacccattctcctagtaagaaacttttatcatactattttttttatgtattagtgttataattcagaattctaagttatgctcttggttggtaattggtattgcagcatattggtggcgaatgtttgcatcacaaactccaaatttgcagaagctagctattaagattttgagtttcacttgcagtgcttcaggatgtgaaagaaattggagtgtgtttaagcaagtaattgtgacaaaactctaactatactttttaattttatttaatttttatgatcaagttttatttggagtatatttgagattgaaatcaacattatttgttatgttgtagattcattccaaaaaaagaaataggcttgagcacaagaggttgcatgatttggtgtttgtcaaatacaaccaacaattaaagcaaagatataatgcaagagatgaaattgatccaatttctcttaatgatattgatgtatgcaatgaatggctcgtgggagagatggatcaagatgatgataatgatgctggaaatgatttggtatttgaagatgatgatgctctaaattgggcaactgtgtatcaggcttcgggggttggagagtgtaggatgtacactaggcggaaaaagcaaaaaacaagtgttgctgctgcccaaacttctaaaaaacaggcaatggttgttggatcttcttcaaggaagcaaaaagtagtccaagaaaatgatgaggatctagatgttgaggagaatattgatgttgaatctaaagaagaagaaatcatggtcaattttgaggcgtttgatggggaagagggagagggagatgctccattaccatatgataacaacgaagatgattatgttgggattggagaagatgattagagcctcaaccttcactttgcactttgcattatgtttttatcattttcttattttgaactctttaatgagtttatttggtgttggtacttgattattgtatgaactcatgaaacttttttagtttatttgaatgcaatcctttgtttttttcaatttcaatgagtttatatatatgtttttttttgtccgccatttt

SEQ ID NO: 16024 - DNA, 1157 bp, Glycine max
  Gm_smallRNAprecursor_8857
gggaatagtgtccgtaagggcatatgttaactgaacttatggatctgaaccatgtacagtagttttaatttaaacagtatatgtttgaatagtattttctggaagcacagcagtctgatattttagttgagcgatactgtagcagtaagtcccgtgattgagaaaggacagtaaggctaaggtgtattgttcaaataaaatattgagacataatatactggtggctataggagtagtgttcaaactatattgttcgtaaaaaaaaaaatctttttcatttgttcagacccaagaagttctgtaacatatagccttatgaaaatatttctatggaaccaaatgaaggcaaagacattagagaatgttataatcatgtctagactattgcgctctttttcccgtatctcttttcgatcaaattcctcctcatcatcttcttcaagaaattccaacttattaagtgatcaagataacctgacccaagaggtcgcccccaaacacaatctcttcgatgaggaagtctgattcgaagatatcaatcaaaacatggatgactggaacatttaaaaaatccctcaggatcaactataagttcctgaaacaattaaggacaaacacaactttgattacataatcaaaacagtagaaaacaatattcctctaggacaagatataggggaagaatttcatttactttcaaaaagttcaatttatgaacatagtcgtaagtataaatatctacacatcgactgtgtacaagtagccatcaagcccttaattgacatgggcatagatgcagcagttttaatgtgtctaagagatattaggcataataaatttcaagactccttaattggaacagtcgaaaccagcctaggacaaggtccaatatattttaattgttatccaaacaagacagtgagtctgatggacagaaacattcttgactctctgatcttaaacatccactttcatggccttgacatgaaagaaggatcaatcccagcagccttaatttataggatccagtacaaggtcatgaatacttgtgcatctagagtcctgttaaaacctcaaaaaggagaaacaactttgtttatcactgatatgacaaaggctaacgtttctctcccaagaaaaataaagtgggatgaagt

SEQ ID NO: 16025 - DNA, 1126 bp, Glycine max
  Gm_smallRNAprecursor_8858
ggattaacacaaactttcttctgataaaaaaaccttaagaacgaagtaatcctaggaacccccttcattagagccttgtttcccattcaaatatctaatgaaggaataaccacaaattatttaggaagaaaaattatatttaatttttctactaaaccaatctccagaaatataaatcttatagaaaataagattaatcaaattaacttcttaaaagaagaagtatcttttaataatattcagatacaactgggaaaaccccaagtaaaagaaaaaattcaatctttattaaatcatatcgaatcaactatatgttctgatttgccacatgcattttgggacagaaagaaacatattgttgatctcccttatgagaaagactttagggaaaaaaaaattcccacaaaagccagaccaatccaaatgaacgaagaacttcttcaatactgccaaaaggaaatcaaggatttgcttgataagggcctaatccggaaaagcaaaagcccatggtcttgtgcggctttttatgtcaacaaacaatctgagattgagcgtggaacaccccgcttagtcataaattacaaaccactaaatcaagcattacaatggattaggtatcctattccaaacaaaaaagatttgcttaacagattaaattctgcaaagatattttcaaaatttgatatgaaatctggattttggcaaatccaaatccaagaatcagataggtacaaaacaatgtttactgtaccttttgggcaatacgaatggaatgtgatgtcattcggactgaagaatgccccttcagaatttcaaaaaattatgaatgatatttttaatccttattcaaaatttgtcattgtcaacatagatgatgttttaatcttttcctaaaacatcgaccaacatttcaaacatctccagactttcatccatatcatcaaacagaatggtttggcagtctccaaatcaaaaatcaatcttttccaaactcgaattcgattccttggtcacaatatatatcaaggtacaatcattccaatagaaaggtcaatagagtttgctagcaaatttcccaaccaaatcttagacaaaacccagttacaaagatttctaggttgtctaa

SEQ ID NO: 16026 - DNA, 1168 bp, Glycine max
  Gm_smallRNAprecursor_8859
atggtcttgtgcggctttttatgtcaacaaacaatctgagattgagcgtggaacaccccgcttagtcataaattacaaaccactaaatcaagcattacaatggattaggtatcctattccaaacaaaaaagatttgcttaacagattaaattctgcaaagatattttcaaaatttgatatgaaatctggattttggcaaatccaaatccaagaatcagataggtacaaaacaatgtttactgtaccttttgggcaatacgaatggaatgtgatgtcattcggactgaagaatgccccttcagaatttcaaaaaattatgaatgatatttttaatccttattcaaaatttgtcattgtcaacatagatgatgttttaatcttttcctaaaacatcgaccaacatttcaaacatctccagactttcatccatatcatcaaacagaatggtttggcagtctccaaatcaaaaatcaatcttttccaaactcgaattcgattccttggtcacaatatatatcaaggtacaatcattccaatagaaaggtcaatagagtttgctagcaaatttcccaaccaaatcttagacaaaacccagttacaaagatttctaggttgtctaaattatgtaggagaatttgtcccctatttaaacaatatattcaagccattgcatgataggctgaagaaaaatccgcctccttggtctgacctccatacacaaatagttaaagagatcaaactcaaagtccaatccataaaatgtttgtatcttcctattccacaggcatttaaaattgttgaaactgatgcatcagacataggttatggtggcatcctcaaacaaagagtccatggccaagatcatgtcattgcatatacatcaaaacattggaatcctgcacaattaaaatattcaactgttaaaaaggaagttttagcaattgttttgtgcatttccaaatttcaatcggatttgttaaaccaaaagtttttaatcagggttgattgtaaatcagccaaagatattttacaaaaagatgttaaaaaccttgtctcaaaacaaatttttgcaaggtggcaagcaattctaagtgtctttgattttgacatagaatatatcaagggcacctcaaattcattacctgactaccttacccgtgaattctta

SEQ ID NO: 16027 - DNA, 1035 bp, Glycine max
  Gm_smallRNAprecursor_8860
attgtcaacatagatgatgttttaatcttttcctaaaacatcgaccaacatttcaaacatctccagactttcatccatatcatcaaacagaatggtttggcagtctccaaatcaaaaatcaatcttttccaaactcgaattcgattccttggtcacaatatatatcaaggtacaatcattccaatagaaaggtcaatagagtttgctagcaaatttcccaaccaaatcttagacaaaacccagttacaaagatttctaggttgtctaaattatgtaggagaatttgtcccctatttaaacaatatattcaagccattgcatgataggctgaagaaaaatccgcctccttggtctgacctccatacacaaatagttaaagagatcaaactcaaagtccaatccataaaatgtttgtatcttcctattccacaggcatttaaaattgttgaaactgatgcatcagacataggttatggtggcatcctcaaacaaagagtccatggccaagatcatgtcattgcatatacatcaaaacattggaatcctgcacaattaaaatattcaactgttaaaaaggaagttttagcaattgttttgtgcatttccaaatttcaatcggatttgttaaaccaaaagtttttaatcagggttgattgtaaatcagccaaagatattttacaaaaagatgttaaaaaccttgtctcaaaacaaatttttgcaaggtggcaagcaattctaagtgtctttgattttgacatagaatatatcaagggcacctcaaattcattacctgactaccttacccgtgaattcttacagaaaagtggtaatgcctcctaaggcattaggaatctccctaaggggaggacgaagtataggcaaaggagccagactggctcttccagagccaaccactaagaaatcctcaacctcttctgggtcaccaacccaggctgggtcatctacccagaaaaccaatttagaagggtcatcgacccagattacctcaatcaaacctgagccatccacccagga

SEQ ID NO: 16028 - DNA, 1035 bp, Glycine max; identical to SEQ ID NO: 16027
  Gm_smallRNAprecursor_8861

SEQ ID NO: 16029 - DNA, 1037 bp, Glycine max
  Gm_smallRNAprecursor_8862
aaacatcgaccaacatttcaaacatctccagactttcatccatatcatcaaacagaatggtttggcagtctccaaatcaaaaatcaatcttttccaaactcgaattcgattccttggtcacaatatatatcaaggtacaatcattccaatagaaaggtcaatagagtttgctagcaaatttcccaaccaaatcttagacaaaacccagttacaaagatttctaggttgtctaaattatgtaggagaatttgtcccctatttaaacaatatattcaagccattgcatgataggctgaagaaaaatccgcctccttggtctgacctccatacacaaatagttaaagagatcaaactcaaagtccaatccataaaatgtttgtatcttcctattccacaggcatttaaaattgttgaaactgatgcatcagacataggttatggtggcatcctcaaacaaagagtccatggccaagatcatgtcattgcatatacatcaaaacattggaatcctgcacaattaaaatattcaactgttaaaaaggaagttttagcaattgttttgtgcatttccaaatttcaatcggatttgttaaaccaaaagtttttaatcagggttgattgtaaatcagccaaagatattttacaaaaagatgttaaaaaccttgtctcaaaacaaatttttgcaaggtggcaagcaattctaagtgtctttgattttgacatagaatatatcaagggcacctcaaattcattacctgactaccttacccgtgaattcttacagaaaagtggtaatgcctcctaaggcattaggaatctccctaaggggaggacgaagtataggcaaaggagccagactggctcttccagagccaaccactaagaaatcctcaacctcttctgggtcaccaacccaggctgggtcatctacccagaaaaccaatttagaagggtcatcgacccagattacctcaatcaaacctgagccatccacccaggaatctcccaaaccggcaaccgccaaacaaacatcggcc

SEQ ID NO: 16030 - DNA, 1208 bp, Glycine max
  Gm_smallRNAprecursor_8863
ctaaggcattaggaatctccctaaggggaggacgaagtataggcaaaggagccagactggctcttccagagccaaccactaagaaatcctcaacctcttctgggtcaccaacccaggctgggtcatctacccagaaaaccaatttagaagggtcatcgacccagattacctcaatcaaacctgagccatccacccaggaatctcccaaaccggcaaccgccaaacaaacatcggccaattgtgcatggccaattgaaacccttcaggcccttcaagacatgggtctaaccaaatttccaaaaataatcaaaaaatcttgggcagacattgcctcagaatctgatgatgattctgaatcaaatttacaaacaatgatccaaaatgcatcattgaccaaaacaactaccaatcctaaaggaaaactacctttagccaaagcacaaacaccacctaccagacaaactagcaattatatttataaaaataaatttttaactgttttgcagatggaacctgaattttgggacaaaaatcccttcaaggcgatggccaaggctttcccaccaggatttcactacaaaccaaccaccatcttgaagacaagaactttttatgagttgattttggtagattcaaattcagtatctatcaaacatttcaaagacccaaaagaccaaacattaaacacccactccacaatccaaatactaaaagttcttcaaccaagacactttggttcggacttgaacaaaggaaagagattttcagttccatttgatccggtaggttatacctattgggattatgttgatgcttggacaaaggtgttttggcaccaaaatacccgcttcaggcattcatggctgatatatttcaagaccaatacaatttacaattttcccaattggtttttacaatggtgggacttctttggaccaattccagagatattcccagaaacagtccaacaaggatttgctcaatttgagagacaatacaattcgcaggaatcacgaattccagtagatcttaaatacttctcaagctttgcactgtcatggatcttctcatggcaatatcgttacagcaagactgataagacaaaccaatatccatcactacaaagacacgcatttgtaaaatggtggacgtatatatatatatatatatatatatatatatatatatatatatatatatatatatat

SEQ ID NO: 16031 - DNA, 1208 bp, Glycine max; identical to SEQ ID NO: 16030
  Gm_smallRNAprecursor_8864

SEQ ID NO: 16032 - DNA, 1211 bp, Glycine max
  Gm_smallRNAprecursor_8865
ctaaggcattaggaatctccctaaggggaggacgaagtataggcaaaggagccagactggctcttccagagccaaccactaagaaatcctcaacctcttctgggtcaccaacccaggctgggtcatctacccagaaaaccaatttagaagggtcatcgacccagattacctcaatcaaacctgagccatccacccaggaatctcccaaaccggcaaccgccaaacaaacatcggccaattgtgcatggccaattgaaacccttcaggcccttcaagacatgggtctaaccaaatttccaaaaataatcaaaaaatcttgggcagacattgcctcagaatctgatgatgattctgaatcaaatttacaaacaatgatccaaaatgcatcattgaccaaaacaactaccaatcctaaaggaaaactacctttagccaaagcacaaacaccacctaccagacaaactagcaattatatttataaaaataaatttttaactgttttgcagatggaacctgaattttgggacaaaaatcccttcaaggcgatggccaaggctttcccaccaggatttcactacaaaccaaccaccatcttgaagacaagaactttttatgagttgattttggtagattcaaattcagtatctatcaaacatttcaaagacccaaaagaccaaacattaaacacccactccacaatccaaatactaaaagttcttcaaccaagacactttggttcggacttgaacaaaggaaagagattttcagttccatttgatccggtaggttatacctattgggattatgttgatgcttggacaaaggtgttttggcaccaaaatacccgcttcaggcattcatggctgatatatttcaagaccaatacaatttacaattttcccaattggtttttacaatggtgggacttctttggaccaattccagagatattcccagaaacagtccaacaaggatttgctcaatttgagagacaatacaattcgcaggaatcacgaattccagtagatcttaaatacttctcaagctttgcactgtcatggatcttctcatggcaatatcgttacagcaagactgataagacaaaccaatatccatcactacaaagacacgcatttgtaaaatggtggacgtatatatatatatatatatatatatatatatatatatatatatatatatatatatatata

SEQ ID NO: 16033 - DNA, 1082 bp, Glycine max
  Gm_smallRNAprecursor_8866
atctacccagaaaaccaatttagaagggtcatcgacccagattacctcaatcaaacctgagccatccacccaggaatctcccaaaccggcaaccgccaaacaaacatcggccaattgtgcatggccaattgaaacccttcaggcccttcaagacatgggtctaaccaaatttccaaaaataatcaaaaaatcttgggcagacattgcctcagaatctgatgatgattctgaatcaaatttacaaacaatgatccaaaatgcatcattgaccaaaacaactaccaatcctaaaggaaaactacctttagccaaagcacaaacaccacctaccagacaaactagcaattatatttataaaaataaatttttaactgttttgcagatggaacctgaattttgggacaaaaatcccttcaaggcgatggccaaggctttcccaccaggatttcactacaaaccaaccaccatcttgaagacaagaactttttatgagttgattttggtagattcaaattcagtatctatcaaacatttcaaagacccaaaagaccaaacattaaacacccactccacaatccaaatactaaaagttcttcaaccaagacactttggttcggacttgaacaaaggaaagagattttcagttccatttgatccggtaggttatacctattgggattatgttgatgcttggacaaaggtgttttggcaccaaaatacccgcttcaggcattcatggctgatatatttcaagaccaatacaatttacaattttcccaattggtttttacaatggtgggacttctttggaccaattccagagatattcccagaaacagtccaacaaggatttgctcaatttgagagacaatacaattcgcaggaatcacgaattccagtagatcttaaatacttctcaagctttgcactgtcatggatcttctcatggcaatatcgttacagcaagactgataagacaaaccaatatccatcactacaaagacacgcatttgtaaaatggtggacgtatatatatatatatatatatatatatatatatatatatatatatatatatatat

SEQ ID NO: 16034 - DNA, 1082 bp, Glycine max; identical to SEQ ID NO: 16033
  Gm_smallRNAprecursor_8867

SEQ ID NO: 16035 - DNA, 1084 bp, Glycine max
  Gm_smallRNAprecursor_8868
atctacccagaaaaccaatttagaagggtcatcgacccagattacctcaatcaaacctgagccatccacccaggaatctcccaaaccggcaaccgccaaacaaacatcggccaattgtgcatggccaattgaaacccttcaggcccttcaagacatgggtctaaccaaatttccaaaaataatcaaaaaatcttgggcagacattgcctcagaatctgatgatgattctgaatcaaatttacaaacaatgatccaaaatgcatcattgaccaaaacaactaccaatcctaaaggaaaactacctttagccaaagcacaaacaccacctaccagacaaactagcaattatatttataaaaataaatttttaactgttttgcagatggaacctgaattttgggacaaaaatcccttcaaggcgatggccaaggctttcccaccaggatttcactacaaaccaaccaccatcttgaagacaagaactttttatgagttgattttggtagattcaaattcagtatctatcaaacatttcaaagacccaaaagaccaaacattaaacacccactccacaatccaaatactaaaagttcttcaaccaagacactttggttcggacttgaacaaaggaaagagattttcagttccatttgatccggtaggttatacctattgggattatgttgatgcttggacaaaggtgttttggcaccaaaatacccgcttcaggcattcatggctgatatatttcaagaccaatacaatttacaattttcccaattggtttttacaatggtgggacttctttggaccaattccagagatattcccagaaacagtccaacaaggatttgctcaatttgagagacaatacaattcgcaggaatcacgaattccagtagatcttaaatacttctcaagctttgcactgtcatggatcttctcatggcaatatcgttacagcaagactgataagacaaaccaatatccatcactacaaagacacgcatttgtaaaatggtggacgtatatatatatatatatatatatatatatatatatatatatatatatatatatatat

SEQ ID NO: 16036 - DNA, 1084 bp, Glycine max; identical to SEQ ID NO: 16035
  Gm_smallRNAprecursor_8869

SEQ ID NO: 16037 - DNA, 1171 bp, Glycine max
  Gm_smallRNAprecursor_8870
tcccaaaccggcaaccgccaaacaaacatcggccaattgtgcatggccaattgaaacccttcaggcccttcaagacatgggtctaaccaaatttccaaaaataatcaaaaaatcttgggcagacattgcctcagaatctgatgatgattctgaatcaaatttacaaacaatgatccaaaatgcatcattgaccaaaacaactaccaatcctaaaggaaaactacctttagccaaagcacaaacaccacctaccagacaaactagcaattatatttataaaaataaatttttaactgttttgcagatggaacctgaattttgggacaaaaatcccttcaaggcgatggccaaggctttcccaccaggatttcactacaaaccaaccaccatcttgaagacaagaactttttatgagttgattttggtagattcaaattcagtatctatcaaacatttcaaagacccaaaagaccaaacattaaacacccactccacaatccaaatactaaaagttcttcaaccaagacactttggttcggacttgaacaaaggaaagagattttcagttccatttgatccggtaggttatacctattgggattatgttgatgcttggacaaaggtgttttggcaccaaaatacccgcttcaggcattcatggctgatatatttcaagaccaatacaatttacaattttcccaattggtttttacaatggtgggacttctttggaccaattccagagatattcccagaaacagtccaacaaggatttgctcaatttgagagacaatacaattcgcaggaatcacgaattccagtagatcttaaatacttctcaagctttgcactgtcatggatcttctcatggcaatatcgttacagcaagactgataagacaaaccaatatccatcactacaaagacacgcatttgtaaaatggtggacgtatatatatatatatatatatatatatatatatatatatatatatatatatatatatatatatatatatatatatatatattattgaattgttgaacatggattaattagttttattgttgtcgatccaattaactttaaattgaagattaaatggccgataaaaaaattgaagatgaaactttggtcatgttcttctacgattgtgagtaaaagagggtag

SEQ ID NO: 16038 - DNA, 1166 bp, Glycine max
  Gm_smallRNAprecursor_8871
ccaaaccggcaaccgccaaacaaacatcggccaattgtgcatggccaattgaaacccttcaggcccttcaagacatgggtctaaccaaatttccaaaaataatcaaaaaatcttgggcagacattgcctcagaatctgatgatgattctgaatcaaatttacaaacaatgatccaaaatgcatcattgaccaaaacaactaccaatcctaaaggaaaactacctttagccaaagcacaaacaccacctaccagacaaactagcaattatatttataaaaataaatttttaactgttttgcagatggaacctgaattttgggacaaaaatcccttcaaggcgatggccaaggctttcccaccaggatttcactacaaaccaaccaccatcttgaagacaagaactttttatgagttgattttggtagattcaaattcagtatctatcaaacatttcaaagacccaaaagaccaaacattaaacacccactccacaatccaaatactaaaagttcttcaaccaagacactttggttcggacttgaacaaaggaaagagattttcagttccatttgatccggtaggttatacctattgggattatgttgatgcttggacaaaggtgttttggcaccaaaatacccgcttcaggcattcatggctgatatatttcaagaccaatacaatttacaattttcccaattggtttttacaatggtgggacttctttggaccaattccagagatattcccagaaacagtccaacaaggatttgctcaatttgagagacaatacaattcgcaggaatcacgaattccagtagatcttaaatacttctcaagctttgcactgtcatggatcttctcatggcaatatcgttacagcaagactgataagacaaaccaatatccatcactacaaagacacgcatttgtaaaatggtggacgtatatatatatatatatatatatatatatatatatatatatatatatatatatatatatatatatatatatatatatatattattgaattgttgaacatggattaattagttttattgttgtcgatccaattaactttaaattgaagattaaatggccgataaaaaaattgaagatgaaactttggtcatgttcttctacgattgtgagtaaaagaggg

SEQ ID NO: 16039 - DNA, 1169 bp, Glycine max
  Gm_smallRNAprecursor_8872
ccaaaccggcaaccgccaaacaaacatcggccaattgtgcatggccaattgaaacccttcaggcccttcaagacatgggtctaaccaaatttccaaaaataatcaaaaaatcttgggcagacattgcctcagaatctgatgatgattctgaatcaaatttacaaacaatgatccaaaatgcatcattgaccaaaacaactaccaatcctaaaggaaaactacctttagccaaagcacaaacaccacctaccagacaaactagcaattatatttataaaaataaatttttaactgttttgcagatggaacctgaattttgggacaaaaatcccttcaaggcgatggccaaggctttcccaccaggatttcactacaaaccaaccaccatcttgaagacaagaactttttatgagttgattttggtagattcaaattcagtatctatcaaacatttcaaagacccaaaagaccaaacattaaacacccactccacaatccaaatactaaaagttcttcaaccaagacactttggttcggacttgaacaaaggaaagagattttcagttccatttgatccggtaggttatacctattgggattatgttgatgcttggacaaaggtgttttggcaccaaaatacccgcttcaggcattcatggctgatatatttcaagaccaatacaatttacaattttcccaattggtttttacaatggtgggacttctttggaccaattccagagatattcccagaaacagtccaacaaggatttgctcaatttgagagacaatacaattcgcaggaatcacgaattccagtagatcttaaatacttctcaagctttgcactgtcatggatcttctcatggcaatatcgttacagcaagactgataagacaaaccaatatccatcactacaaagacacgcatttgtaaaatggtggacgtatatatatatatatatatatatatatatatatatatatatatatatatatatatatatatatatatatatatatatatattattgaattgttgaacatggattaattagttttattgttgtcgatccaattaactttaaattgaagattaaatggccgataaaaaaattgaagatgaaactttggtcatgttcttctacgattgtgagtaaaagagggtag

SEQ ID NO: 16040 - DNA, 1098 bp, Glycine max
  Gm_smallRNAprecursor_8873
caagacatgggtctaaccaaatttccaaaaataatcaaaaaatcttgggcagacattgcctcagaatctgatgatgattctgaatcaaatttacaaacaatgatccaaaatgcatcattgaccaaaacaactaccaatcctaaaggaaaactacctttagccaaagcacaaacaccacctaccagacaaactagcaattatatttataaaaataaatttttaactgttttgcagatggaacctgaattttgggacaaaaatcccttcaaggcgatggccaaggctttcccaccaggatttcactacaaaccaaccaccatcttgaagacaagaactttttatgagttgattttggtagattcaaattcagtatctatcaaacatttcaaagacccaaaagaccaaacattaaacacccactccacaatccaaatactaaaagttcttcaaccaagacactttggttcggacttgaacaaaggaaagagattttcagttccatttgatccggtaggttatacctattgggattatgttgatgcttggacaaaggtgttttggcaccaaaatacccgcttcaggcattcatggctgatatatttcaagaccaatacaatttacaattttcccaattggtttttacaatggtgggacttctttggaccaattccagagatattcccagaaacagtccaacaaggatttgctcaatttgagagacaatacaattcgcaggaatcacgaattccagtagatcttaaatacttctcaagctttgcactgtcatggatcttctcatggcaatatcgttacagcaagactgataagacaaaccaatatccatcactacaaagacacgcatttgtaaaatggtggacgtatatatatatatatatatatatatatatatatatatatatatatatatatatatatatatatatatatatatatatatattattgaattgttgaacatggattaattagttttattgttgtcgatccaattaactttaaattgaagattaaatggccgataaaaaaattgaagatgaaactttggtcatgttcttctacgattgtgagtaaaagaggg

SEQ ID NO: 16041 - DNA, 1099 bp, Glycine max
  Gm_smallRNAprecursor_8874
caagacatgggtctaaccaaatttccaaaaataatcaaaaaatcttgggcagacattgcctcagaatctgatgatgattctgaatcaaatttacaaacaatgatccaaaatgcatcattgaccaaaacaactaccaatcctaaaggaaaactacctttagccaaagcacaaacaccacctaccagacaaactagcaattatatttataaaaataaatttttaactgttttgcagatggaacctgaattttgggacaaaaatcccttcaaggcgatggccaaggctttcccaccaggatttcactacaaaccaaccaccatcttgaagacaagaactttttatgagttgattttggtagattcaaattcagtatctatcaaacatttcaaagacccaaaagaccaaacattaaacacccactccacaatccaaatactaaaagttcttcaaccaagacactttggttcggacttgaacaaaggaaagagattttcagttccatttgatccggtaggttatacctattgggattatgttgatgcttggacaaaggtgttttggcaccaaaatacccgcttcaggcattcatggctgatatatttcaagaccaatacaatttacaattttcccaattggtttttacaatggtgggacttctttggaccaattccagagatattcccagaaacagtccaacaaggatttgctcaatttgagagacaatacaattcgcaggaatcacgaattccagtagatcttaaatacttctcaagctttgcactgtcatggatcttctcatggcaatatcgttacagcaagactgataagacaaaccaatatccatcactacaaagacacgcatttgtaaaatggtggacgtatatatatatatatatatatatatatatatatatatatatatatatatatatatatatatatatatatatatatatatattattgaattgttgaacatggattaattagttttattgttgtcgatccaattaactttaaattgaagattaaatggccgataaaaaaattgaagatgaaactttggtcatgttcttctacgattgtgagtaaaagagggt

SEQ ID NO: 16042 - DNA, 1132 bp, Glycine max
  Gm_smallRNAprecursor_8875
actttggttctaactttttaatggctcaaaggaaaacccattctcctagtaagaaacttttaccatatgacaaatataaataccatactatttttttatgtattagtgttataattcataattctaagttatgctcttggttggtaattggtattgcagcatatttgtggcgaatgtttgggtcacaaactccaaatttgcagaaactagctattaaaattttgagtttgacttgcagtgcttcaggatgtgaaaaaaattggagtgtgtttgagcaagtaattgtgacaaaactctaactatactttttaattttatttaattttgatgatcaagttttatttggagtatatttgagattgaaatcaatatttatttgttacgttgtagattcattccaaaaaaagaaataggcttgagcacaagaggttgcatgatttggtgtttgtcaaatacaactaacaattgaagcaaagatataatgcaagagatgaaattgatccaatttctcttaatgatattgatgtgtgcaataaatggctcgtgggagagatggatcaagatgatgataatgatgctggaaatgatttggtatttgaagatgatgatgctctaaattgggcaactgtgtatcaggcttcgggggttggagagtgtaggatgtatactaggcggaaaaagcaaaaaacaagaagtgttactgctacacaaacttctaaaaaacagacaatggttgttggatcttcatcaaggaagcaaaaaacagtctaagaaaatgatgaggatctagattttgagaatattgatcttgaatctgaagaagaagaaatcatggtcaattttgaggcgtctgatggggaagagggagagggagatgctccattaccatatgataacaacgaagatgattatgttggaattggagaagatgattagaacctcaaccttcactttgcactttgcattatgtttttatcattttcttattttgaactctttaatgagtttatttggtgttggtacttgattattgtatgaactcatgaaatttttttagtttatttgaatgcaatccttttattttttttcaatttcaatgagtttatatatatgtatttttttttttgtccac

SEQ ID NO: 16043 - DNA, 1089 bp, Glycine max
  Gm_smallRNAprecursor_8876
ttgacttgcagtgcttcaggatgtgaaaaaaattggagtgtgtttgagcaagtaattgtgacaaaactctaactatactttttaattttatttaattttgatgatcaagttttatttggagtatatttgagattgaaatcaatatttatttgttacgttgtagattcattccaaaaaaagaaataggcttgagcacaagaggttgcatgatttggtgtttgtcaaatacaactaacaattgaagcaaagatataatgcaagagatgaaattgatccaatttctcttaatgatattgatgtgtgcaataaatggctcgtgggagagatggatcaagatgatgataatgatgctggaaatgatttggtatttgaagatgatgatgctctaaattgggcaactgtgtatcaggcttcgggggttggagagtgtaggatgtatactaggcggaaaaagcaaaaaacaagaagtgttactgctacacaaacttctaaaaaacagacaatggttgttggatcttcatcaaggaagcaaaaaacagtctaagaaaatgatgaggatctagattttgagaatattgatcttgaatctgaagaagaagaaatcatggtcaattttgaggcgtctgatggggaagagggagagggagatgctccattaccatatgataacaacgaagatgattatgttggaattggagaagatgattagaacctcaaccttcactttgcactttgcattatgtttttatcattttcttattttgaactctttaatgagtttatttggtgttggtacttgattattgtatgaactcatgaaatttttttagtttatttgaatgcaatccttttattttttttcaatttcaatgagtttatatatatgtatttttttttttgtccaccatgacatccaccattttccgctacgccatccaccatatttttatgatggatttttggctttccgccatgaatcaccatccgtcattaacaacattgagacaacatggattaagtgatttacacttagatttttgtgtttttttttctaatcaatattttggaagaaaatttagatctaaaggt

SEQ ID NO: 16044 - DNA, 1089 bp, Glycine max; identical to SEQ ID NO: 16043
  Gm_smallRNAprecursor_8877

SEQ ID NO: 16045 - DNA, 1190 bp, Glycine max
  Gm_smallRNAprecursor_8878
tttttcaattgtagagattgaaaaaaatattgctgacctacatctatgaatggttgtcggtagtagatttcatccactaattgatcgttggttagttgaagggtattgtgcattctacgcttgagtgtatcaagagaacagttgttaggaactcgcattggtgttggagtgggactttgaaaataaacaccagtttggttgtgagtgattgatccatttggaaaaatgaaggctaatctagagttagtaatggtctggctgcttgtttctcccaaaaatgacatagtaataagattgaatttggtttatgagagtatgttctgtgagattgtgcatttgtattgtgtgttgtgttatttatagttgtacgagtattttgccgtgttgatgtgtattggaatccaatgtttctttttccctagtaactgatgtagcaaacgtccattataatttcagagtgaaaaaagagattgagttgtccatctcatgtcagttttgcacacgtctctaaaaattaaatgtctcacctataaaactgacatgaaatggacagctcataatgtagagtgttgtcaattgggactgtgatttttcccatgtaattaaagcagcagacgttcatgataattttcagagtgaacaaagagattatgagttgtccatttcatgtcagttttgcaggtgagacatttaatttttagagacgtgtgcaaattgcagggtgttgtcaatttggactgtgatttttcccttgtaattaaagcagcaggcttccaagattattttcagagtgaacacagagattattagttgtccatttcatgttagttttttcgatgagacatttaatttttagaaacaatgtagtgtaaattgcaaagtattgtgaattttgacagttatgttaccatgtcaactattgcagtaaaagtaggtaaactgaaaattactaatttaaatttaaaggaaaaattatttcaatacgtaaagtgataactgaagatagacataagacattacatgaaaaagtgtgtcatgaatatcattaatgtgtttgacataattttaaaaaaatgcagaacatgggtacttacgcatagttgcaagggtgcaaatcatagttttttttttattttgtgcttctattttgaggtgttattccatggaactggtacacgatataatttttt

SEQ ID NO: 16046 - DNA, 1185 bp, Glycine max
  Gm_smallRNAprecursor_8879
actacattgatcgacaccattttgttcatcaggaacacaatgtacaaccaccaatcggtatactcgaggttggcatgacctttgatgacaaagtacaatgtattcgagcagtcaaagaatacaacgtcagaaatcattttgattgcagaacaatttactctgactagagaaggctaaacttcgtttgtaagttacatgaaaatggttgtacatggagcttgggcgcatgcaattcaaagaggcataacaaatagattatcaagagtatcagaggtcatcacacgtatctcgtgcgatgctcagacaagatcatcgccaactcgataaacacatcatagcacagatcatccaaccaattgtcaaaacaaacccaaccgtctccatcaagacgttgattgcagaaatcaaaacgttcatgaattataccccatcctacaagaagatatggttagcaaagcaaagagcgttggagatgattcatggaaactgggaagaatcatatgccaaactgccaaaacttttcagatttttgcaatcttgtgtttctgggattgtggtcgctgctcaaacagaatccttgtatgaggggggagaaatagtatcaggcaaaagattgtttaaacgtgtcttttggtcatttggtccatgcattaatggttttgcatattgcaaacccatagtacaagtagatggtacatggctttacgggaagtatactggcacactgttgatagctaccgcataagatggagctaatcatatcttcccgattgcctacgccattgtagaaggggagacaacttcagcttgggattttttctaaagaatttgagaatacatgttactccgtaaattaacatttctcttatttcagaccgacacccctcaattataagtgcctacaacaacccaagtaacttatgggtctagaacacatctcatttcttttgcctgcaccacattgcacaaaactttattcgcggtaactcaaactacaaacatttaaagaaaccactcatgttggctgatgagtatctattttatttattcgttaaaattttctttcaatcaaattttataacataatagattgattgaatatttacaggatacacatacacggagaagatgcactggcgacatcttggggatatccgtacgaataagccaagtgcatctaaatgg

SEQ ID NO: 16047 - DNA, 1039 bp, Glycine max
  Gm_smallRNAprecursor_8880
gagcagtcaaagaatacaacgtcagaaatcattttgattgcagaacaatttactctgactagagaaggctaaacttcgtttgtaagttacatgaaaatggttgtacatggagcttgggcgcatgcaattcaaagaggcataacaaatagattatcaagagtatcagaggtcatcacacgtatctcgtgcgatgctcagacaagatcatcgccaactcgataaacacatcatagcacagatcatccaaccaattgtcaaaacaaacccaaccgtctccatcaagacgttgattgcagaaatcaaaacgttcatgaattataccccatcctacaagaagatatggttagcaaagcaaagagcgttggagatgattcatggaaactgggaagaatcatatgccaaactgccaaaacttttcagatttttgcaatcttgtgtttctgggattgtggtcgctgctcaaacagaatccttgtatgaggggggagaaatagtatcaggcaaaagattgtttaaacgtgtcttttggtcatttggtccatgcattaatggttttgcatattgcaaacccatagtacaagtagatggtacatggctttacgggaagtatactggcacactgttgatagctaccgcataagatggagctaatcatatcttcccgattgcctacgccattgtagaaggggagacaacttcagcttgggattttttctaaagaatttgagaatacatgttactccgtaaattaacatttctcttatttcagaccgacacccctcaattataagtgcctacaacaacccaagtaacttatgggtctagaacacatctcatttcttttgcctgcaccacattgcacaaaactttattcgcggtaactcaaactacaaacatttaaagaaaccactcatgttggctgatgagtatctattttatttattcgttaaaattttctttcaatcaaattttataacataatagattgattgaatatttacaggatacacatacacggagaagatgcactggcgacatc

SEQ ID NO: 16048 - DNA, 1051 bp, Glycine max
  Gm_smallRNAprecursor_8881
ctggcgacatcttggggatatccgtacgaataagccaagtgcatctaaatggcttgatcaattacccaaacaaaaaatgggtacgatgcttcgatgagggaaaatgttggggacatatgactaccaatttttcggagtctgttaattccatgttcaaaaacacaagacatttgtcggtgtcatcgttggttgaggagacgtatttcaagaccgcacaactcttagctaatagaggtcgacaaacttaggcaatgatcaactctggctcacagtattatgaagttgtcttcaatgcaatgaatagcgatcaacaagaatctaatacacacattgtaaatgaattcgacagacacaatcacacttttattataacagagactcaatccccactttaaacacccagaccacctggaaggtttagagtaatgttacaatctcaaaagtgtgattgtggtgaatatcaggctaaactcttaccgtgttctcacgtcatgactgcttgtaaatctgtcaatgttgatctcatgacctatgtgccgatgttattcattttacaacacattttgcacatctatgacaactcctttggtttattgtcacacgaatcaatgtggcaagaatacgaaggagatcagtggggtcctgatccaaggagaaagaggactgcaaagggacgtcccgtttcaactcacattcctaatgagatggacgaagacgaaaatgaacgagcaagtagaaaaaaatgtggactttgctggtaacatggtcatagcagaaacaattgtcctaatatatcctaatcttaagttttttcttagccaaatgtcattgtttaaatattttattgataatgcaatataatgttcttctataaataaattgttaaaagctttggttttatcatttttaattaaatctaatgacataaacaaactaattatatttagtaaaataattaaattaaaatttttaaatttatagtaaaataaatatatattattatacaaaattcagattttaaaacaaatattcaaccaaaaatatcttaaat

SEQ ID NO: 16049 - DNA, 1052 bp, Glycine max
  Gm_smallRNAprecursor_8882
ctggcgacatcttggggatatccgtacgaataagccaagtgcatctaaatggcttgatcaattacccaaacaaaaaatgggtacgatgcttcgatgagggaaaatgttggggacatatgactaccaatttttcggagtctgttaattccatgttcaaaaacacaagacatttgtcggtgtcatcgttggttgaggagacgtatttcaagaccgcacaactcttagctaatagaggtcgacaaacttaggcaatgatcaactctggctcacagtattatgaagttgtcttcaatgcaatgaatagcgatcaacaagaatctaatacacacattgtaaatgaattcgacagacacaatcacacttttattataacagagactcaatccccactttaaacacccagaccacctggaaggtttagagtaatgttacaatctcaaaagtgtgattgtggtgaatatcaggctaaactcttaccgtgttctcacgtcatgactgcttgtaaatctgtcaatgttgatctcatgacctatgtgccgatgttattcattttacaacacattttgcacatctatgacaactcctttggtttattgtcacacgaatcaatgtggcaagaatacgaaggagatcagtggggtcctgatccaaggagaaagaggactgcaaagggacgtcccgtttcaactcacattcctaatgagatggacgaagacgaaaatgaacgagcaagtagaaaaaaatgtggactttgctggtaacatggtcatagcagaaacaattgtcctaatatatcctaatcttaagttttttcttagccaaatgtcattgtttaaatattttattgataatgcaatataatgttcttctataaataaattgttaaaagctttggttttatcatttttaattaaatctaatgacataaacaaactaattatatttagtaaaataattaaattaaaatttttaaatttatagtaaaataaatatatattattatacaaaattcagattttaaaacaaatattcaaccaaaaatatcttaaata

SEQ ID NO: 16050 - DNA, 1190 bp, Glycine max
  Gm_smallRNAprecursor_8883
acctctaatcttgaggacttatcaggtgaatacgagacttgttggctcaaacaccatgatagtgatacggactcctcttccgggcccgaaggaagtaacctgtctccatcccacgaacctatattcaaacgggattggtaatctacggatcattcatgtctaagttatttcttctttgagattttcatgtaatgtcttatgtctgtcttcagttatcactttacgtattgaaataatttttcctttaaatttaaattagcaattttcagtttacccacttttactgcagtagttgacatggtaacataactgtcaaaatttacaatactttgtcatttacactacactgtttttaaaaattaaatgtctcatcgacaaaactgacatgaaatggacaactcataatctctttattcactctgaaaataattatggatgtttgttgctttaattacaagggaaaaatcacaatccaaattgacaatactctgcaatttgcacacgtctctaaaaattaaatgtctcacctgcaaaactgccatgaaatggacagctcatcatctctttattcactctgaaaatcatcatgaacgtttgttgctttaattacatgggaaaaatcacagtccaaattaacaacactctgcattatgagctgtccatttcatatcagttttacaggtgatacatttaatttttagagacgtgtgcaaaactgacatgagatggacaactcataatctctttgttcactctgaaattataatggacgtctgctacatcacttactagggaaaaagaaacattggattccaatacacatcaacgtggcagaatactcatacaactataaataacacaacacagacacaatacaaacacacaatctcacacaacataatttcacaaaccaaattcaatcttattactatgtcatttttgggagaaacaagcaatcagaccattactaactctagattagctttcatttttccaaatggatcaatcagttacaaccaaattggtgtttattttcaaagtctcattccaatgccaatgtgagttcctaacaactgttcttttgatacactcaagtgtagaatgcacaacacccttcaactagccaacgatcaattactggatgaaatctactactgacagccattcatagatgcaggtcaacaatattt

SEQ ID NO: 16051 - DNA, 1066 bp, Glycine max
  Gm_smallRNAprecursor_8884
ccataagttagttgggttgttgtaggcacttataattaatcgaggggtgtctatatgaaaggagagaaatgttaatttgtggagtaacatgccttctcaaattctttaggaaaaaccccacgctgaagttgtctccccttctacaatggcgtatgcaatcgaaaaatatggttaattccatcttgtgttgtagctatcaataatgtgcaatatacttcttgtaaagacatgtaccatctacttgtactatgggtttgcaatatgcaaactcattaatgcatggaccaaaccaaaagacacgtttaagcattttttttgcgaggtacaatttctctcccctcaaacacggattttgtttgaccagcgaccacagtcccgggaacacgagattgcaaagctcccaaaagttttggtagcttggcatatgattctctcccgtttccatgaatcatgtccaacgctctttgctttgctaaccatgtgtttttgtaggatggagtataattcatgaacgttttgatctctgcaatcaacgtcttgatggagattgttgggtttgttttgacaattggttggatgatctatgctatgacgtgttttttgagttgtcgatggtcttgtccgagcattggcgcgagacaagtgtgatgacatctgatactcttgataatccatttcttatgcctctttgaattgcatgtgcctaagctccatgtacaaccattttcatgtgatttacacacgaagttgagccttttctggtcataatatatagttctgcaatcaaaatggtgccgatcaatgtagtgtgatcgatggtcaaggttcaagtccactagacacctaggttggtgatataacaacggaggtgacaaaggtgatgttggtccgccagcacccttgtcatcgctttggtcatcactttggtcatcgctttggttattgatgtgatcaaagaactgttgatcctcatcctcactaaaatcattcatcctcatgaaaccatataatggcatcttcgttagtgatgggatgttcattttagtttgatgtttgtgtttgtggt

SEQ ID NO: 16052 - DNA, 1072 bp, Glycine max
  Gm_smallRNAprecursor_8885
ttttgttggacgaaaatgtcaatatttttttattggaggaaaatgtcaatatttttttacctaaacgtcagtacgtttcattggaccaaaaatgttactaagttaccattattgaacgaaaatgttagcaattttttgttggacctaaatatcagtatgtttctatacgactaatttgttagacccaaaatttcgtttcatttaagagtaaaatataattttaggataaattttcgtcattttttattgttacaagcataacattataatagtcacttaaaaaatatattggcgatcataatttaaaacaaacatagtaataatgataatattgattatcaatcataatttatctatcacaataaaaattattcaaataaatattataccagtttaccaaaataaaacattgtaacaatatacaaatcattacaattttttccaaattaccataaaagataaatatatttcatatttcacttattcattgacaaatgtgtccctaaaagatgaaaatacaaaatttagtcattgaatgtcgcactttttacactttcggagactaaattttgtattttcatcttttagggacacatttgtcaatgaattacacattcaatgacaaaagtgtttatttacccattcatattcccagagagtgggagacgaagagtcaagaaaatattatatgacaaatatgttcttatattagcaattagagatgattatgttggtcatcatttcagtgacaaatctcgtccatacgtgctacgtaaactattttattaacattgacggaagaaagttaatgaccgcatatatttgtcgtacttcttatatgttcgaagactaaattttgtattttcatcttttagatatatatttatcagcaaattatacattcagaaacaaaaatgacttcttagttaaatttcactttgtacaaccaaatcatagttttatgataattttcttatacactctatataataaaaacacatttttattaaactagtgagtttaaaaaagaaaaaacagaatcacaattcctatttctgttatagtatgtata

SEQ ID NO: 16053 - DNA, 1107 bp, Glycine max
  Gm_smallRNAprecursor_8886
gaatttggttttgcaatatgtgtatttccttttcttggtttgcgtttctccaaaaaaattgtagggaaatgtattgtatgaattgataggaaaatcactatgtttgttcattactctatttgactggcggtcaccaaaactagaatgtaataaatccataatctgtttgtgacacttgaaaatcttctgttgtttattttccttctcagatccaagctggtttatataaaatttgactacatgcatctataatcttatatgtagtgtgtgtttggttaacaaatggcaattgtttttcaatgcaatgaggtgatcatatcaccctctaatttcagggttcaagcaatttcagccccaccttgaggatggtgaatgttcatgatggtttatattttattgattttcaaccatccttgtctgcactacagtctttctccatcgccgtggcgattattcatacacagagtcctactcttcggcctaatagtacctatgaagcaccgacaccgacacggacaccggacacgacacggacacggacacgtggacacctataatgtccaaaatatagaacgtagtacgggtgtcgtgtcggtgtcagacactgacacggacgcgtgtcggacaccggacacggcaaggagctggagtgtccgtgcttcatagaatagtacacaggagctgtgacaacagaagaaaaaagttgaggttattagcaggcataatcctttggtatgttgaatgagttgatgagaagatttaggtgaatacatgaatcaagttttcaattttcattccattgtttatggttgttatttgtcatacagtccaaggtaaccttatctaggagaactagctctgcttgtccatttctctcgattcttgtaagcatcttctctcccttctttttgctgaaaggggttgaatgtaaaagcttctgatgaagaaaatttggtaaatcctaggcattgtgattggttttgttatatttgttaataagaagatactgtgattagttcttaatctgatgaataactatttgaaggtagcaattgaagcacattggagatgttatatctttaaatttctgttggccaaatatggtag

SEQ ID NO: 16054 - DNA, 1112 bp, Glycine max
  Gm_smallRNAprecursor_8887
gaatttggttttgcaatatgtgtatttccttttcttggtttgcgtttctccaaaaaaattgtagggaaatgtattgtatgaattgataggaaaatcactatgtttgttcattactctatttgactggcggtcaccaaaactagaatgtaataaatccataatctgtttgtgacacttgaaaatcttctgttgtttattttccttctcagatccaagctggtttatataaaatttgactacatgcatctataatcttatatgtagtgtgtgtttggttaacaaatggcaattgtttttcaatgcaatgaggtgatcatatcaccctctaatttcagggttcaagcaatttcagccccaccttgaggatggtgaatgttcatgatggtttatattttattgattttcaaccatccttgtctgcactacagtctttctccatcgccgtggcgattattcatacacagagtcctactcttcggcctaatagtacctatgaagcaccgacaccgacacggacaccggacacgacacggacacggacacgtggacacctataatgtccaaaatatagaacgtagtacgggtgtcgtgtcggtgtcagacactgacacggacgcgtgtcggacaccggacacggcaaggagctggagtgtccgtgcttcatagaatagtacacaggagctgtgacaacagaagaaaaaagttgaggttattagcaggcataatcctttggtatgttgaatgagttgatgagaagatttaggtgaatacatgaatcaagttttcaattttcattccattgtttatggttgttatttgtcatacagtccaaggtaaccttatctaggagaactagctctgcttgtccatttctctcgattcttgtaagcatcttctctcccttctttttgctgaaaggggttgaatgtaaaagcttctgatgaagaaaatttggtaaatcctaggcattgtgattggttttgttatatttgttaataagaagatactgtgattagttcttaatctgatgaataactatttgaaggtagcaattgaagcacattggagatgttatatctttaaatttctgttggccaaatatggtagttcca

SEQ ID NO: 16055 - DNA, 1113 bp, Glycine max
  Gm_smallRNAprecursor_8888
gaatttggttttgcaatatgtgtatttccttttcttggtttgcgtttctccaaaaaaattgtagggaaatgtattgtatgaattgataggaaaatcactatgtttgttcattactctatttgactggcggtcaccaaaactagaatgtaataaatccataatctgtttgtgacacttgaaaatcttctgttgtttattttccttctcagatccaagctggtttatataaaatttgactacatgcatctataatcttatatgtagtgtgtgtttggttaacaaatggcaattgtttttcaatgcaatgaggtgatcatatcaccctctaatttcagggttcaagcaatttcagccccaccttgaggatggtgaatgttcatgatggtttatattttattgattttcaaccatccttgtctgcactacagtctttctccatcgccgtggcgattattcatacacagagtcctactcttcggcctaatagtacctatgaagcaccgacaccgacacggacaccggacacgacacggacacggacacgtggacacctataatgtccaaaatatagaacgtagtacgggtgtcgtgtcggtgtcagacactgacacggacgcgtgtcggacaccggacacggcaaggagctggagtgtccgtgcttcatagaatagtacacaggagctgtgacaacagaagaaaaaagttgaggttattagcaggcataatcctttggtatgttgaatgagttgatgagaagatttaggtgaatacatgaatcaagttttcaattttcattccattgtttatggttgttatttgtcatacagtccaaggtaaccttatctaggagaactagctctgcttgtccatttctctcgattcttgtaagcatcttctctcccttctttttgctgaaaggggttgaatgtaaaagcttctgatgaagaaaatttggtaaatcctaggcattgtgattggttttgttatatttgttaataagaagatactgtgattagttcttaatctgatgaataactatttgaaggtagcaattgaagcacattggagatgttatatctttaaatttctgttggccaaatatggtagttccaa

SEQ ID NO: 16056 - DNA, 1113 bp, Glycine max; identical to SEQ ID NO: 16055
  Gm_smallRNAprecursor_8889

SEQ ID NO: 16057 - DNA, 1118 bp, Glycine max
  Gm_smallRNAprecursor_8890
gaatttggttttgcaatatgtgtatttccttttcttggtttgcgtttctccaaaaaaattgtagggaaatgtattgtatgaattgataggaaaatcactatgtttgttcattactctatttgactggcggtcaccaaaactagaatgtaataaatccataatctgtttgtgacacttgaaaatcttctgttgtttattttccttctcagatccaagctggtttatataaaatttgactacatgcatctataatcttatatgtagtgtgtgtttggttaacaaatggcaattgtttttcaatgcaatgaggtgatcatatcaccctctaatttcagggttcaagcaatttcagccccaccttgaggatggtgaatgttcatgatggtttatattttattgattttcaaccatccttgtctgcactacagtctttctccatcgccgtggcgattattcatacacagagtcctactcttcggcctaatagtacctatgaagcaccgacaccgacacggacaccggacacgacacggacacggacacgtggacacctataatgtccaaaatatagaacgtagtacgggtgtcgtgtcggtgtcagacactgacacggacgcgtgtcggacaccggacacggcaaggagctggagtgtccgtgcttcatagaatagtacacaggagctgtgacaacagaagaaaaaagttgaggttattagcaggcataatcctttggtatgttgaatgagttgatgagaagatttaggtgaatacatgaatcaagttttcaattttcattccattgtttatggttgttatttgtcatacagtccaaggtaaccttatctaggagaactagctctgcttgtccatttctctcgattcttgtaagcatcttctctcccttctttttgctgaaaggggttgaatgtaaaagcttctgatgaagaaaatttggtaaatcctaggcattgtgattggttttgttatatttgttaataagaagatactgtgattagttcttaatctgatgaataactatttgaaggtagcaattgaagcacattggagatgttatatctttaaatttctgttggccaaatatggtagttccaattttc

SEQ ID NO: 16058 - DNA, 1119 bp, Glycine max
  Gm_smallRNAprecursor_8891
gaatttggttttgcaatatgtgtatttccttttcttggtttgcgtttctccaaaaaaattgtagggaaatgtattgtatgaattgataggaaaatcactatgtttgttcattactctatttgactggcggtcaccaaaactagaatgtaataaatccataatctgtttgtgacacttgaaaatcttctgttgtttattttccttctcagatccaagctggtttatataaaatttgactacatgcatctataatcttatatgtagtgtgtgtttggttaacaaatggcaattgtttttcaatgcaatgaggtgatcatatcaccctctaatttcagggttcaagcaatttcagccccaccttgaggatggtgaatgttcatgatggtttatattttattgattttcaaccatccttgtctgcactacagtctttctccatcgccgtggcgattattcatacacagagtcctactcttcggcctaatagtacctatgaagcaccgacaccgacacggacaccggacacgacacggacacggacacgtggacacctataatgtccaaaatatagaacgtagtacgggtgtcgtgtcggtgtcagacactgacacggacgcgtgtcggacaccggacacggcaaggagctggagtgtccgtgcttcatagaatagtacacaggagctgtgacaacagaagaaaaaagttgaggttattagcaggcataatcctttggtatgttgaatgagttgatgagaagatttaggtgaatacatgaatcaagttttcaattttcattccattgtttatggttgttatttgtcatacagtccaaggtaaccttatctaggagaactagctctgcttgtccatttctctcgattcttgtaagcatcttctctcccttctttttgctgaaaggggttgaatgtaaaagcttctgatgaagaaaatttggtaaatcctaggcattgtgattggttttgttatatttgttaataagaagatactgtgattagttcttaatctgatgaataactatttgaaggtagcaattgaagcacattggagatgttatatctttaaatttctgttggccaaatatggtagttccaattttct

SEQ ID NO: 16059 - DNA, 1119 bp, Glycine max; identical to SEQ ID NO: 16058
  Gm_smallRNAprecursor_8892

SEQ ID NO: 16060 - DNA, 1120 bp, Glycine max
  Gm_smallRNAprecursor_8893
gaatttggttttgcaatatgtgtatttccttttcttggtttgcgtttctccaaaaaaattgtagggaaatgtattgtatgaattgataggaaaatcactatgtttgttcattactctatttgactggcggtcaccaaaactagaatgtaataaatccataatctgtttgtgacacttgaaaatcttctgttgtttattttccttctcagatccaagctggtttatataaaatttgactacatgcatctataatcttatatgtagtgtgtgtttggttaacaaatggcaattgtttttcaatgcaatgaggtgatcatatcaccctctaatttcagggttcaagcaatttcagccccaccttgaggatggtgaatgttcatgatggtttatattttattgattttcaaccatccttgtctgcactacagtctttctccatcgccgtggcgattattcatacacagagtcctactcttcggcctaatagtacctatgaagcaccgacaccgacacggacaccggacacgacacggacacggacacgtggacacctataatgtccaaaatatagaacgtagtacgggtgtcgtgtcggtgtcagacactgacacggacgcgtgtcggacaccggacacggcaaggagctggagtgtccgtgcttcatagaatagtacacaggagctgtgacaacagaagaaaaaagttgaggttattagcaggcataatcctttggtatgttgaatgagttgatgagaagatttaggtgaatacatgaatcaagttttcaattttcattccattgtttatggttgttatttgtcatacagtccaaggtaaccttatctaggagaactagctctgcttgtccatttctctcgattcttgtaagcatcttctctcccttctttttgctgaaaggggttgaatgtaaaagcttctgatgaagaaaatttggtaaatcctaggcattgtgattggttttgttatatttgttaataagaagatactgtgattagttcttaatctgatgaataactatttgaaggtagcaattgaagcacattggagatgttatatctttaaatttctgttggccaaatatggtagttccaattttctg

SEQ ID NO: 16061 - DNA, 1117 bp, Glycine max
  Gm_smallRNAprecursor_8894
aatttggttttgcaatatgtgtatttccttttcttggtttgcgtttctccaaaaaaattgtagggaaatgtattgtatgaattgataggaaaatcactatgtttgttcattactctatttgactggcggtcaccaaaactagaatgtaataaatccataatctgtttgtgacacttgaaaatcttctgttgtttattttccttctcagatccaagctggtttatataaaatttgactacatgcatctataatcttatatgtagtgtgtgtttggttaacaaatggcaattgtttttcaatgcaatgaggtgatcatatcaccctctaatttcagggttcaagcaatttcagccccaccttgaggatggtgaatgttcatgatggtttatattttattgattttcaaccatccttgtctgcactacagtctttctccatcgccgtggcgattattcatacacagagtcctactcttcggcctaatagtacctatgaagcaccgacaccgacacggacaccggacacgacacggacacggacacgtggacacctataatgtccaaaatatagaacgtagtacgggtgtcgtgtcggtgtcagacactgacacggacgcgtgtcggacaccggacacggcaaggagctggagtgtccgtgcttcatagaatagtacacaggagctgtgacaacagaagaaaaaagttgaggttattagcaggcataatcctttggtatgttgaatgagttgatgagaagatttaggtgaatacatgaatcaagttttcaattttcattccattgtttatggttgttatttgtcatacagtccaaggtaaccttatctaggagaactagctctgcttgtccatttctctcgattcttgtaagcatcttctctcccttctttttgctgaaaggggttgaatgtaaaagcttctgatgaagaaaatttggtaaatcctaggcattgtgattggttttgttatatttgttaataagaagatactgtgattagttcttaatctgatgaataactatttgaaggtagcaattgaagcacattggagatgttatatctttaaatttctgttggccaaatatggtagttccaattttc

SEQ ID NO: 16062 - DNA, 1117 bp, Glycine max; identical to SEQ ID NO: 16061
  Gm_smallRNAprecursor_8895

SEQ ID NO: 16063 - DNA, 1118 bp, Glycine max
  Gm_smallRNAprecursor_8896
aatttggttttgcaatatgtgtatttccttttcttggtttgcgtttctccaaaaaaattgtagggaaatgtattgtatgaattgataggaaaatcactatgtttgttcattactctatttgactggcggtcaccaaaactagaatgtaataaatccataatctgtttgtgacacttgaaaatcttctgttgtttattttccttctcagatccaagctggtttatataaaatttgactacatgcatctataatcttatatgtagtgtgtgtttggttaacaaatggcaattgtttttcaatgcaatgaggtgatcatatcaccctctaatttcagggttcaagcaatttcagccccaccttgaggatggtgaatgttcatgatggtttatattttattgattttcaaccatccttgtctgcactacagtctttctccatcgccgtggcgattattcatacacagagtcctactcttcggcctaatagtacctatgaagcaccgacaccgacacggacaccggacacgacacggacacggacacgtggacacctataatgtccaaaatatagaacgtagtacgggtgtcgtgtcggtgtcagacactgacacggacgcgtgtcggacaccggacacggcaaggagctggagtgtccgtgcttcatagaatagtacacaggagctgtgacaacagaagaaaaaagttgaggttattagcaggcataatcctttggtatgttgaatgagttgatgagaagatttaggtgaatacatgaatcaagttttcaattttcattccattgtttatggttgttatttgtcatacagtccaaggtaaccttatctaggagaactagctctgcttgtccatttctctcgattcttgtaagcatcttctctcccttctttttgctgaaaggggttgaatgtaaaagcttctgatgaagaaaatttggtaaatcctaggcattgtgattggttttgttatatttgttaataagaagatactgtgattagttcttaatctgatgaataactatttgaaggtagcaattgaagcacattggagatgttatatctttaaatttctgttggccaaatatggtagttccaattttct

SEQ ID NO: 16064 - DNA, 1072 bp, Glycine max
  Gm_smallRNAprecursor_8897
tggttttgcaatatgtgtatttccttttcttggtttgcgtttctccaaaaaaattgtagggaaatgtattgtatgaattgataggaaaatcactatgtttgttcattactctatttgactggcggtcaccaaaactagaatgtaataaatccataatctgtttgtgacacttgaaaatcttctgttgtttattttccttctcagatccaagctggtttatataaaatttgactacatgcatctataatcttatatgtagtgtgtgtttggttaacaaatggcaattgtttttcaatgcaatgaggtgatcatatcaccctctaatttcagggttcaagcaatttcagccccaccttgaggatggtgaatgttcatgatggtttatattttattgattttcaaccatccttgtctgcactacagtctttctccatcgccgtggcgattattcatacacagagtcctactcttcggcctaatagtacctatgaagcaccgacaccgacacggacaccggacacgacacggacacggacacgtggacacctataatgtccaaaatatagaacgtagtacgggtgtcgtgtcggtgtcagacactgacacggacgcgtgtcggacaccggacacggcaaggagctggagtgtccgtgcttcatagaatagtacacaggagctgtgacaacagaagaaaaaagttgaggttattagcaggcataatcctttggtatgttgaatgagttgatgagaagatttaggtgaatacatgaatcaagttttcaattttcattccattgtttatggttgttatttgtcatacagtccaaggtaaccttatctaggagaactagctctgcttgtccatttctctcgattcttgtaagcatcttctctcccttctttttgctgaaaggggttgaatgtaaaagcttctgatgaagaaaatttggtaaatcctaggcattgtgattggttttgttatatttgttaataagaagatactgtgattagttcttaatctgatgaataactatttgaaggtagcaattgaagcacattggagatgttatat

SEQ ID NO: 16065 - DNA, 1073 bp, Glycine max
  Gm_smallRNAprecursor_8898
tggttttgcaatatgtgtatttccttttcttggtttgcgtttctccaaaaaaattgtagggaaatgtattgtatgaattgataggaaaatcactatgtttgttcattactctatttgactggcggtcaccaaaactagaatgtaataaatccataatctgtttgtgacacttgaaaatcttctgttgtttattttccttctcagatccaagctggtttatataaaatttgactacatgcatctataatcttatatgtagtgtgtgtttggttaacaaatggcaattgtttttcaatgcaatgaggtgatcatatcaccctctaatttcagggttcaagcaatttcagccccaccttgaggatggtgaatgttcatgatggtttatattttattgattttcaaccatccttgtctgcactacagtctttctccatcgccgtggcgattattcatacacagagtcctactcttcggcctaatagtacctatgaagcaccgacaccgacacggacaccggacacgacacggacacggacacgtggacacctataatgtccaaaatatagaacgtagtacgggtgtcgtgtcggtgtcagacactgacacggacgcgtgtcggacaccggacacggcaaggagctggagtgtccgtgcttcatagaatagtacacaggagctgtgacaacagaagaaaaaagttgaggttattagcaggcataatcctttggtatgttgaatgagttgatgagaagatttaggtgaatacatgaatcaagttttcaattttcattccattgtttatggttgttatttgtcatacagtccaaggtaaccttatctaggagaactagctctgcttgtccatttctctcgattcttgtaagcatcttctctcccttctttttgctgaaaggggttgaatgtaaaagcttctgatgaagaaaatttggtaaatcctaggcattgtgattggttttgttatatttgttaataagaagatactgtgattagttcttaatctgatgaataactatttgaaggtagcaattgaagcacattggagatgttatatc

SEQ ID NO: 16066 - DNA, 1070 bp, Glycine max
  Gm_smallRNAprecursor_8899
ggttttgcaatatgtgtatttccttttcttggtttgcgtttctccaaaaaaattgtagggaaatgtattgtatgaattgataggaaaatcactatgtttgttcattactctatttgactggcggtcaccaaaactagaatgtaataaatccataatctgtttgtgacacttgaaaatcttctgttgtttattttccttctcagatccaagctggtttatataaaatttgactacatgcatctataatcttatatgtagtgtgtgtttggttaacaaatggcaattgtttttcaatgcaatgaggtgatcatatcaccctctaatttcagggttcaagcaatttcagccccaccttgaggatggtgaatgttcatgatggtttatattttattgattttcaaccatccttgtctgcactacagtctttctccatcgccgtggcgattattcatacacagagtcctactcttcggcctaatagtacctatgaagcaccgacaccgacacggacaccggacacgacacggacacggacacgtggacacctataatgtccaaaatatagaacgtagtacgggtgtcgtgtcggtgtcagacactgacacggacgcgtgtcggacaccggacacggcaaggagctggagtgtccgtgcttcatagaatagtacacaggagctgtgacaacagaagaaaaaagttgaggttattagcaggcataatcctttggtatgttgaatgagttgatgagaagatttaggtgaatacatgaatcaagttttcaattttcattccattgtttatggttgttatttgtcatacagtccaaggtaaccttatctaggagaactagctctgcttgtccatttctctcgattcttgtaagcatcttctctcccttctttttgctgaaaggggttgaatgtaaaagcttctgatgaagaaaatttggtaaatcctaggcattgtgattggttttgttatatttgttaataagaagatactgtgattagttcttaatctgatgaataactatttgaaggtagcaattgaagcacattggagatgttata

SEQ ID NO: 16067 - DNA, 1070 bp, Glycine max; identical to SEQ ID NO: 16066
  Gm_smallRNAprecursor_8900

SEQ ID NO: 16068 - DNA, 1071 bp, Glycine max
  Gm_smallRNAprecursor_8901
ggttttgcaatatgtgtatttccttttcttggtttgcgtttctccaaaaaaattgtagggaaatgtattgtatgaattgataggaaaatcactatgtttgttcattactctatttgactggcggtcaccaaaactagaatgtaataaatccataatctgtttgtgacacttgaaaatcttctgttgtttattttccttctcagatccaagctggtttatataaaatttgactacatgcatctataatcttatatgtagtgtgtgtttggttaacaaatggcaattgtttttcaatgcaatgaggtgatcatatcaccctctaatttcagggttcaagcaatttcagccccaccttgaggatggtgaatgttcatgatggtttatattttattgattttcaaccatccttgtctgcactacagtctttctccatcgccgtggcgattattcatacacagagtcctactcttcggcctaatagtacctatgaagcaccgacaccgacacggacaccggacacgacacggacacggacacgtggacacctataatgtccaaaatatagaacgtagtacgggtgtcgtgtcggtgtcagacactgacacggacgcgtgtcggacaccggacacggcaaggagctggagtgtccgtgcttcatagaatagtacacaggagctgtgacaacagaagaaaaaagttgaggttattagcaggcataatcctttggtatgttgaatgagttgatgagaagatttaggtgaatacatgaatcaagttttcaattttcattccattgtttatggttgttatttgtcatacagtccaaggtaaccttatctaggagaactagctctgcttgtccatttctctcgattcttgtaagcatcttctctcccttctttttgctgaaaggggttgaatgtaaaagcttctgatgaagaaaatttggtaaatcctaggcattgtgattggttttgttatatttgttaataagaagatactgtgattagttcttaatctgatgaataactatttgaaggtagcaattgaagcacattggagatgttatat

SEQ ID NO: 16069 - DNA, 1071 bp, Glycine max; identical to SEQ ID NO: 16068
  Gm_smallRNAprecursor_8902

SEQ ID NO: 16070 - DNA, 1072 bp, Glycine max
  Gm_smallRNAprecursor_8903
ggttttgcaatatgtgtatttccttttcttggtttgcgtttctccaaaaaaattgtagggaaatgtattgtatgaattgataggaaaatcactatgtttgttcattactctatttgactggcggtcaccaaaactagaatgtaataaatccataatctgtttgtgacacttgaaaatcttctgttgtttattttccttctcagatccaagctggtttatataaaatttgactacatgcatctataatcttatatgtagtgtgtgtttggttaacaaatggcaattgtttttcaatgcaatgaggtgatcatatcaccctctaatttcagggttcaagcaatttcagccccaccttgaggatggtgaatgttcatgatggtttatattttattgattttcaaccatccttgtctgcactacagtctttctccatcgccgtggcgattattcatacacagagtcctactcttcggcctaatagtacctatgaagcaccgacaccgacacggacaccggacacgacacggacacggacacgtggacacctataatgtccaaaatatagaacgtagtacgggtgtcgtgtcggtgtcagacactgacacggacgcgtgtcggacaccggacacggcaaggagctggagtgtccgtgcttcatagaatagtacacaggagctgtgacaacagaagaaaaaagttgaggttattagcaggcataatcctttggtatgttgaatgagttgatgagaagatttaggtgaatacatgaatcaagttttcaattttcattccattgtttatggttgttatttgtcatacagtccaaggtaaccttatctaggagaactagctctgcttgtccatttctctcgattcttgtaagcatcttctctcccttctttttgctgaaaggggttgaatgtaaaagcttctgatgaagaaaatttggtaaatcctaggcattgtgattggttttgttatatttgttaataagaagatactgtgattagttcttaatctgatgaataactatttgaaggtagcaattgaagcacattggagatgttatatc

SEQ ID NO: 16071 - DNA, 1072 bp, Glycine max; identical to SEQ ID NO: 16070
  Gm_smallRNAprecursor_8904

SEQ ID NO: 16072 - DNA, 1101 bp, Glycine max
  Gm_smallRNAprecursor_8905
ggttttgcaatatgtgtatttccttttcttggtttgcgtttctccaaaaaaattgtagggaaatgtattgtatgaattgataggaaaatcactatgtttgttcattactctatttgactggcggtcaccaaaactagaatgtaataaatccataatctgtttgtgacacttgaaaatcttctgttgtttattttccttctcagatccaagctggtttatataaaatttgactacatgcatctataatcttatatgtagtgtgtgtttggttaacaaatggcaattgtttttcaatgcaatgaggtgatcatatcaccctctaatttcagggttcaagcaatttcagccccaccttgaggatggtgaatgttcatgatggtttatattttattgattttcaaccatccttgtctgcactacagtctttctccatcgccgtggcgattattcatacacagagtcctactcttcggcctaatagtacctatgaagcaccgacaccgacacggacaccggacacgacacggacacggacacgtggacacctataatgtccaaaatatagaacgtagtacgggtgtcgtgtcggtgtcagacactgacacggacgcgtgtcggacaccggacacggcaaggagctggagtgtccgtgcttcatagaatagtacacaggagctgtgacaacagaagaaaaaagttgaggttattagcaggcataatcctttggtatgttgaatgagttgatgagaagatttaggtgaatacatgaatcaagttttcaattttcattccattgtttatggttgttatttgtcatacagtccaaggtaaccttatctaggagaactagctctgcttgtccatttctctcgattcttgtaagcatcttctctcccttctttttgctgaaaggggttgaatgtaaaagcttctgatgaagaaaatttggtaaatcctaggcattgtgattggttttgttatatttgttaataagaagatactgtgattagttcttaatctgatgaataactatttgaaggtagcaattgaagcacattggagatgttatatctttaaatttctgttggccaaatatggtag

SEQ ID NO: 16073 - DNA, 1101 bp, Glycine max; identical to SEQ ID NO: 16072
  Gm_smallRNAprecursor_8906

SEQ ID NO: 16074 - DNA, 1112 bp, Glycine max
  Gm_smallRNAprecursor_8907
ggttttgcaatatgtgtatttccttttcttggtttgcgtttctccaaaaaaattgtagggaaatgtattgtatgaattgataggaaaatcactatgtttgttcattactctatttgactggcggtcaccaaaactagaatgtaataaatccataatctgtttgtgacacttgaaaatcttctgttgtttattttccttctcagatccaagctggtttatataaaatttgactacatgcatctataatcttatatgtagtgtgtgtttggttaacaaatggcaattgtttttcaatgcaatgaggtgatcatatcaccctctaatttcagggttcaagcaatttcagccccaccttgaggatggtgaatgttcatgatggtttatattttattgattttcaaccatccttgtctgcactacagtctttctccatcgccgtggcgattattcatacacagagtcctactcttcggcctaatagtacctatgaagcaccgacaccgacacggacaccggacacgacacggacacggacacgtggacacctataatgtccaaaatatagaacgtagtacgggtgtcgtgtcggtgtcagacactgacacggacgcgtgtcggacaccggacacggcaaggagctggagtgtccgtgcttcatagaatagtacacaggagctgtgacaacagaagaaaaaagttgaggttattagcaggcataatcctttggtatgttgaatgagttgatgagaagatttaggtgaatacatgaatcaagttttcaattttcattccattgtttatggttgttatttgtcatacagtccaaggtaaccttatctaggagaactagctctgcttgtccatttctctcgattcttgtaagcatcttctctcccttctttttgctgaaaggggttgaatgtaaaagcttctgatgaagaaaatttggtaaatcctaggcattgtgattggttttgttatatttgttaataagaagatactgtgattagttcttaatctgatgaataactatttgaaggtagcaattgaagcacattggagatgttatatctttaaatttctgttggccaaatatggtagttccaattttc

SEQ ID NO: 16075 - DNA, 1112 bp, Glycine max; identical to SEQ ID NO: 16074
  Gm_smallRNAprecursor_8908

SEQ ID NO: 16076 - DNA, 1113 bp, Glycine max
  Gm_smallRNAprecursor_8909
ggttttgcaatatgtgtatttccttttcttggtttgcgtttctccaaaaaaattgtagggaaatgtattgtatgaattgataggaaaatcactatgtttgttcattactctatttgactggcggtcaccaaaactagaatgtaataaatccataatctgtttgtgacacttgaaaatcttctgttgtttattttccttctcagatccaagctggtttatataaaatttgactacatgcatctataatcttatatgtagtgtgtgtttggttaacaaatggcaattgtttttcaatgcaatgaggtgatcatatcaccctctaatttcagggttcaagcaatttcagccccaccttgaggatggtgaatgttcatgatggtttatattttattgattttcaaccatccttgtctgcactacagtctttctccatcgccgtggcgattattcatacacagagtcctactcttcggcctaatagtacctatgaagcaccgacaccgacacggacaccggacacgacacggacacggacacgtggacacctataatgtccaaaatatagaacgtagtacgggtgtcgtgtcggtgtcagacactgacacggacgcgtgtcggacaccggacacggcaaggagctggagtgtccgtgcttcatagaatagtacacaggagctgtgacaacagaagaaaaaagttgaggttattagcaggcataatcctttggtatgttgaatgagttgatgagaagatttaggtgaatacatgaatcaagttttcaattttcattccattgtttatggttgttatttgtcatacagtccaaggtaaccttatctaggagaactagctctgcttgtccatttctctcgattcttgtaagcatcttctctcccttctttttgctgaaaggggttgaatgtaaaagcttctgatgaagaaaatttggtaaatcctaggcattgtgattggttttgttatatttgttaataagaagatactgtgattagttcttaatctgatgaataactatttgaaggtagcaattgaagcacattggagatgttatatctttaaatttctgttggccaaatatggtagttccaattttct

SEQ ID NO: 16077 - DNA, 1113 bp, Glycine max; identical to SEQ ID NO: 16076
  Gm_smallRNAprecursor_8910

SEQ ID NO: 16078 - DNA, 1113 bp, Glycine max; identical to SEQ ID NO: 16076
  Gm_smallRNAprecursor_8911

SEQ ID NO: 16079 - DNA, 1113 bp, Glycine max; identical to SEQ ID NO: 16076
  Gm_smallRNAprecursor_8912

SEQ ID NO: 16080 - DNA, 1114 bp, Glycine max
  Gm_smallRNAprecursor_8913
ggttttgcaatatgtgtatttccttttcttggtttgcgtttctccaaaaaaattgtagggaaatgtattgtatgaattgataggaaaatcactatgtttgttcattactctatttgactggcggtcaccaaaactagaatgtaataaatccataatctgtttgtgacacttgaaaatcttctgttgtttattttccttctcagatccaagctggtttatataaaatttgactacatgcatctataatcttatatgtagtgtgtgtttggttaacaaatggcaattgtttttcaatgcaatgaggtgatcatatcaccctctaatttcagggttcaagcaatttcagccccaccttgaggatggtgaatgttcatgatggtttatattttattgattttcaaccatccttgtctgcactacagtctttctccatcgccgtggcgattattcatacacagagtcctactcttcggcctaatagtacctatgaagcaccgacaccgacacggacaccggacacgacacggacacggacacgtggacacctataatgtccaaaatatagaacgtagtacgggtgtcgtgtcggtgtcagacactgacacggacgcgtgtcggacaccggacacggcaaggagctggagtgtccgtgcttcatagaatagtacacaggagctgtgacaacagaagaaaaaagttgaggttattagcaggcataatcctttggtatgttgaatgagttgatgagaagatttaggtgaatacatgaatcaagttttcaattttcattccattgtttatggttgttatttgtcatacagtccaaggtaaccttatctaggagaactagctctgcttgtccatttctctcgattcttgtaagcatcttctctcccttctttttgctgaaaggggttgaatgtaaaagcttctgatgaagaaaatttggtaaatcctaggcattgtgattggttttgttatatttgttaataagaagatactgtgattagttcttaatctgatgaataactatttgaaggtagcaattgaagcacattggagatgttatatctttaaatttctgttggccaaatatggtagttccaattttctg

SEQ ID NO: 16081 - DNA, 1114 bp, Glycine max; identical to SEQ ID NO: 16080
  Gm_smallRNAprecursor_8914

SEQ ID NO: 16082 - DNA, 1115 bp, Glycine max
  Gm_smallRNAprecursor_8915
ggttttgcaatatgtgtatttccttttcttggtttgcgtttctccaaaaaaattgtagggaaatgtattgtatgaattgataggaaaatcactatgtttgttcattactctatttgactggcggtcaccaaaactagaatgtaataaatccataatctgtttgtgacacttgaaaatcttctgttgtttattttccttctcagatccaagctggtttatataaaatttgactacatgcatctataatcttatatgtagtgtgtgtttggttaacaaatggcaattgtttttcaatgcaatgaggtgatcatatcaccctctaatttcagggttcaagcaatttcagccccaccttgaggatggtgaatgttcatgatggtttatattttattgattttcaaccatccttgtctgcactacagtctttctccatcgccgtggcgattattcatacacagagtcctactcttcggcctaatagtacctatgaagcaccgacaccgacacggacaccggacacgacacggacacggacacgtggacacctataatgtccaaaatatagaacgtagtacgggtgtcgtgtcggtgtcagacactgacacggacgcgtgtcggacaccggacacggcaaggagctggagtgtccgtgcttcatagaatagtacacaggagctgtgacaacagaagaaaaaagttgaggttattagcaggcataatcctttggtatgttgaatgagttgatgagaagatttaggtgaatacatgaatcaagttttcaattttcattccattgtttatggttgttatttgtcatacagtccaaggtaaccttatctaggagaactagctctgcttgtccatttctctcgattcttgtaagcatcttctctcccttctttttgctgaaaggggttgaatgtaaaagcttctgatgaagaaaatttggtaaatcctaggcattgtgattggttttgttatatttgttaataagaagatactgtgattagttcttaatctgatgaataactatttgaaggtagcaattgaagcacattggagatgttatatctttaaatttctgttggccaaatatggtagttccaattttctga

SEQ ID NO: 16083 - DNA, 1115 bp, Glycine max; identical to SEQ ID NO: 16082
  Gm_smallRNAprecursor_8916

SEQ ID NO: 16084 - DNA, 1116 bp, Glycine max
  Gm_smallRNAprecursor_8917
ggttttgcaatatgtgtatttccttttcttggtttgcgtttctccaaaaaaattgtagggaaatgtattgtatgaattgataggaaaatcactatgtttgttcattactctatttgactggcggtcaccaaaactagaatgtaataaatccataatctgtttgtgacacttgaaaatcttctgttgtttattttccttctcagatccaagctggtttatataaaatttgactacatgcatctataatcttatatgtagtgtgtgtttggttaacaaatggcaattgtttttcaatgcaatgaggtgatcatatcaccctctaatttcagggttcaagcaatttcagccccaccttgaggatggtgaatgttcatgatggtttatattttattgattttcaaccatccttgtctgcactacagtctttctccatcgccgtggcgattattcatacacagagtcctactcttcggcctaatagtacctatgaagcaccgacaccgacacggacaccggacacgacacggacacggacacgtggacacctataatgtccaaaatatagaacgtagtacgggtgtcgtgtcggtgtcagacactgacacggacgcgtgtcggacaccggacacggcaaggagctggagtgtccgtgcttcatagaatagtacacaggagctgtgacaacagaagaaaaaagttgaggttattagcaggcataatcctttggtatgttgaatgagttgatgagaagatttaggtgaatacatgaatcaagttttcaattttcattccattgtttatggttgttatttgtcatacagtccaaggtaaccttatctaggagaactagctctgcttgtccatttctctcgattcttgtaagcatcttctctcccttctttttgctgaaaggggttgaatgtaaaagcttctgatgaagaaaatttggtaaatcctaggcattgtgattggttttgttatatttgttaataagaagatactgtgattagttcttaatctgatgaataactatttgaaggtagcaattgaagcacattggagatgttatatctttaaatttctgttggccaaatatggtagttccaattttctgaa

SEQ ID NO: 16085 - DNA, 1116 bp, Glycine max; identical to SEQ ID NO: 16084
  Gm_smallRNAprecursor_8918

SEQ ID NO: 16086 - DNA, 1069 bp, Glycine max
  Gm_smallRNAprecursor_8919
gttttgcaatatgtgtatttccttttcttggtttgcgtttctccaaaaaaattgtagggaaatgtattgtatgaattgataggaaaatcactatgtttgttcattactctatttgactggcggtcaccaaaactagaatgtaataaatccataatctgtttgtgacacttgaaaatcttctgttgtttattttccttctcagatccaagctggtttatataaaatttgactacatgcatctataatcttatatgtagtgtgtgtttggttaacaaatggcaattgtttttcaatgcaatgaggtgatcatatcaccctctaatttcagggttcaagcaatttcagccccaccttgaggatggtgaatgttcatgatggtttatattttattgattttcaaccatccttgtctgcactacagtctttctccatcgccgtggcgattattcatacacagagtcctactcttcggcctaatagtacctatgaagcaccgacaccgacacggacaccggacacgacacggacacggacacgtggacacctataatgtccaaaatatagaacgtagtacgggtgtcgtgtcggtgtcagacactgacacggacgcgtgtcggacaccggacacggcaaggagctggagtgtccgtgcttcatagaatagtacacaggagctgtgacaacagaagaaaaaagttgaggttattagcaggcataatcctttggtatgttgaatgagttgatgagaagatttaggtgaatacatgaatcaagttttcaattttcattccattgtttatggttgttatttgtcatacagtccaaggtaaccttatctaggagaactagctctgcttgtccatttctctcgattcttgtaagcatcttctctcccttctttttgctgaaaggggttgaatgtaaaagcttctgatgaagaaaatttggtaaatcctaggcattgtgattggttttgttatatttgttaataagaagatactgtgattagttcttaatctgatgaataactatttgaaggtagcaattgaagcacattggagatgttata

SEQ ID NO: 16087 - DNA, 1069 bp, Glycine max; identical to SEQ ID NO: 16086
  Gm_smallRNAprecursor_8920

SEQ ID NO: 16088 - DNA, 1069 bp, Glycine max; identical to SEQ ID NO: 16086
  Gm_smallRNAprecursor_8921

SEQ ID NO: 16089 - DNA, 1069 bp, Glycine max; identical to SEQ ID NO: 16086
  Gm_smallRNAprecursor_8922

SEQ ID NO: 16090 - DNA, 1071 bp, Glycine max
  Gm_smallRNAprecursor_8923
gttttgcaatatgtgtatttccttttcttggtttgcgtttctccaaaaaaattgtagggaaatgtattgtatgaattgataggaaaatcactatgtttgttcattactctatttgactggcggtcaccaaaactagaatgtaataaatccataatctgtttgtgacacttgaaaatcttctgttgtttattttccttctcagatccaagctggtttatataaaatttgactacatgcatctataatcttatatgtagtgtgtgtttggttaacaaatggcaattgtttttcaatgcaatgaggtgatcatatcaccctctaatttcagggttcaagcaatttcagccccaccttgaggatggtgaatgttcatgatggtttatattttattgattttcaaccatccttgtctgcactacagtctttctccatcgccgtggcgattattcatacacagagtcctactcttcggcctaatagtacctatgaagcaccgacaccgacacggacaccggacacgacacggacacggacacgtggacacctataatgtccaaaatatagaacgtagtacgggtgtcgtgtcggtgtcagacactgacacggacgcgtgtcggacaccggacacggcaaggagctggagtgtccgtgcttcatagaatagtacacaggagctgtgacaacagaagaaaaaagttgaggttattagcaggcataatcctttggtatgttgaatgagttgatgagaagatttaggtgaatacatgaatcaagttttcaattttcattccattgtttatggttgttatttgtcatacagtccaaggtaaccttatctaggagaactagctctgcttgtccatttctctcgattcttgtaagcatcttctctcccttctttttgctgaaaggggttgaatgtaaaagcttctgatgaagaaaatttggtaaatcctaggcattgtgattggttttgttatatttgttaataagaagatactgtgattagttcttaatctgatgaataactatttgaaggtagcaattgaagcacattggagatgttatatc

SEQ ID NO: 16091 - DNA, 1071 bp, Glycine max; identical to SEQ ID NO: 16090
  Gm_smallRNAprecursor_8924

SEQ ID NO: 16092 - DNA, 1060 bp, Glycine max
  Gm_smallRNAprecursor_8925
atgtgtatttccttttcttggtttgcgtttctccaaaaaaattgtagggaaatgtattgtatgaattgataggaaaatcactatgtttgttcattactctatttgactggcggtcaccaaaactagaatgtaataaatccataatctgtttgtgacacttgaaaatcttctgttgtttattttccttctcagatccaagctggtttatataaaatttgactacatgcatctataatcttatatgtagtgtgtgtttggttaacaaatggcaattgtttttcaatgcaatgaggtgatcatatcaccctctaatttcagggttcaagcaatttcagccccaccttgaggatggtgaatgttcatgatggtttatattttattgattttcaaccatccttgtctgcactacagtctttctccatcgccgtggcgattattcatacacagagtcctactcttcggcctaatagtacctatgaagcaccgacaccgacacggacaccggacacgacacggacacggacacgtggacacctataatgtccaaaatatagaacgtagtacgggtgtcgtgtcggtgtcagacactgacacggacgcgtgtcggacaccggacacggcaaggagctggagtgtccgtgcttcatagaatagtacacaggagctgtgacaacagaagaaaaaagttgaggttattagcaggcataatcctttggtatgttgaatgagttgatgagaagatttaggtgaatacatgaatcaagttttcaattttcattccattgtttatggttgttatttgtcatacagtccaaggtaaccttatctaggagaactagctctgcttgtccatttctctcgattcttgtaagcatcttctctcccttctttttgctgaaaggggttgaatgtaaaagcttctgatgaagaaaatttggtaaatcctaggcattgtgattggttttgttatatttgttaataagaagatactgtgattagttcttaatctgatgaataactatttgaaggtagcaattgaagcacattggagatgttatat

SEQ ID NO: 16093 - DNA, 1061 bp, Glycine max
  Gm_smallRNAprecursor_8926
atgtgtatttccttttcttggtttgcgtttctccaaaaaaattgtagggaaatgtattgtatgaattgataggaaaatcactatgtttgttcattactctatttgactggcggtcaccaaaactagaatgtaataaatccataatctgtttgtgacacttgaaaatcttctgttgtttattttccttctcagatccaagctggtttatataaaatttgactacatgcatctataatcttatatgtagtgtgtgtttggttaacaaatggcaattgtttttcaatgcaatgaggtgatcatatcaccctctaatttcagggttcaagcaatttcagccccaccttgaggatggtgaatgttcatgatggtttatattttattgattttcaaccatccttgtctgcactacagtctttctccatcgccgtggcgattattcatacacagagtcctactcttcggcctaatagtacctatgaagcaccgacaccgacacggacaccggacacgacacggacacggacacgtggacacctataatgtccaaaatatagaacgtagtacgggtgtcgtgtcggtgtcagacactgacacggacgcgtgtcggacaccggacacggcaaggagctggagtgtccgtgcttcatagaatagtacacaggagctgtgacaacagaagaaaaaagttgaggttattagcaggcataatcctttggtatgttgaatgagttgatgagaagatttaggtgaatacatgaatcaagttttcaattttcattccattgtttatggttgttatttgtcatacagtccaaggtaaccttatctaggagaactagctctgcttgtccatttctctcgattcttgtaagcatcttctctcccttctttttgctgaaaggggttgaatgtaaaagcttctgatgaagaaaatttggtaaatcctaggcattgtgattggttttgttatatttgttaataagaagatactgtgattagttcttaatctgatgaataactatttgaaggtagcaattgaagcacattggagatgttatatc

SEQ ID NO: 16094 - DNA, 1046 bp, Glycine max
  Gm_smallRNAprecursor_8927
tttcttggtttgcgtttctccaaaaaaattgtagggaaatgtattgtatgaattgataggaaaatcactatgtttgttcattactctatttgactggcggtcaccaaaactagaatgtaataaatccataatctgtttgtgacacttgaaaatcttctgttgtttattttccttctcagatccaagctggtttatataaaatttgactacatgcatctataatcttatatgtagtgtgtgtttggttaacaaatggcaattgtttttcaatgcaatgaggtgatcatatcaccctctaatttcagggttcaagcaatttcagccccaccttgaggatggtgaatgttcatgatggtttatattttattgattttcaaccatccttgtctgcactacagtctttctccatcgccgtggcgattattcatacacagagtcctactcttcggcctaatagtacctatgaagcaccgacaccgacacggacaccggacacgacacggacacggacacgtggacacctataatgtccaaaatatagaacgtagtacgggtgtcgtgtcggtgtcagacactgacacggacgcgtgtcggacaccggacacggcaaggagctggagtgtccgtgcttcatagaatagtacacaggagctgtgacaacagaagaaaaaagttgaggttattagcaggcataatcctttggtatgttgaatgagttgatgagaagatttaggtgaatacatgaatcaagttttcaattttcattccattgtttatggttgttatttgtcatacagtccaaggtaaccttatctaggagaactagctctgcttgtccatttctctcgattcttgtaagcatcttctctcccttctttttgctgaaaggggttgaatgtaaaagcttctgatgaagaaaatttggtaaatcctaggcattgtgattggttttgttatatttgttaataagaagatactgtgattagttcttaatctgatgaataactatttgaaggtagcaattgaagcacattggagatgttata

SEQ ID NO: 16095 - DNA, 1082 bp, Glycine max
  Gm_smallRNAprecursor_8928
tttcttggtttgcgtttctccaaaaaaattgtagggaaatgtattgtatgaattgataggaaaatcactatgtttgttcattactctatttgactggcggtcaccaaaactagaatgtaataaatccataatctgtttgtgacacttgaaaatcttctgttgtttattttccttctcagatccaagctggtttatataaaatttgactacatgcatctataatcttatatgtagtgtgtgtttggttaacaaatggcaattgtttttcaatgcaatgaggtgatcatatcaccctctaatttcagggttcaagcaatttcagccccaccttgaggatggtgaatgttcatgatggtttatattttattgattttcaaccatccttgtctgcactacagtctttctccatcgccgtggcgattattcatacacagagtcctactcttcggcctaatagtacctatgaagcaccgacaccgacacggacaccggacacgacacggacacggacacgtggacacctataatgtccaaaatatagaacgtagtacgggtgtcgtgtcggtgtcagacactgacacggacgcgtgtcggacaccggacacggcaaggagctggagtgtccgtgcttcatagaatagtacacaggagctgtgacaacagaagaaaaaagttgaggttattagcaggcataatcctttggtatgttgaatgagttgatgagaagatttaggtgaatacatgaatcaagttttcaattttcattccattgtttatggttgttatttgtcatacagtccaaggtaaccttatctaggagaactagctctgcttgtccatttctctcgattcttgtaagcatcttctctcccttctttttgctgaaaggggttgaatgtaaaagcttctgatgaagaaaatttggtaaatcctaggcattgtgattggttttgttatatttgttaataagaagatactgtgattagttcttaatctgatgaataactatttgaaggtagcaattgaagcacattggagatgttatatctttaaatttctgttggccaaatatggtagttcca

SEQ ID NO: 16096 - DNA, 1082 bp, Glycine max; identical to SEQ ID NO: 16095
  Gm_smallRNAprecursor_8929

SEQ ID NO: 16097 - DNA, 1119 bp, Glycine max
  Gm_smallRNAprecursor_8930
aacgtttcccctcatcaaagcattgtacccatttttgtttgggtaattgatcaagccattcagctgcacttggcttattcgcacgatatccccaagatgttgccagtgcatcttctccgtgtatgcgtaccctgtaaatatttaatcaatgtattatgttataaaatttgattgaaagaaaattataacgaataaataaaatagattctcaccagccaacataagtggtttctttaaatgtttgcagtttgagttaccacgaagaaagttttgtgcaatgtggcgcaggcaaaagaaatgggatgtgtcctggacccataagttacttgggttgttgtaggcacttataattgaggggtgtcggtctgaaataagagaaatgttaatttgcggagtaacatgtcttctcaaattctttagaaaaaacccccaagctgaagttgtctccccttctacaatggcataggcaatcgggaagatatggttagctccatcttgtgcggtagctatcaacagtgtgccagtatactttccgtaaagccatgtaccatctacttgtacaatgggtttgcaatatgcaaaaccattaatgcatggaccaaatgaccaaaagacacgtttaaacaatcttttgcccggtactatttctcccccctcatacaaggattctgtttgagcagcgaccacagtcccgggaacacaagattgcaaagctccgaaaagttttggcagtttggcatatgattcttcccagtttccatgaatcatctccaatgctttttgctttgctaaccatgtcttcttgtaggatggggtataattcatgaacgttttgatctctgcaatcaatgtcttgatggagacagttgggtttgttttgacaattggttggatgatctgtgctatgacgtgtttgtcgagttggcgatgatcttgtctaagcatcggcacgagacaagtgtgatgacctctgatactcttgataatccatttgttatgcctctttgaattgcatgcgcccaagctccatgtacaaccattttcatgtaacttgcagacgaagtgtagccttctttggtcagagtaaattgttctgcaatcaaaatgatttctgatgtt

SEQ ID NO: 16098 - DNA, 1200 bp, Glycine max
  Gm_smallRNAprecursor_8931
aacgtttcccctcatcaaagcattgtacccatttttgtttgggtaattgatcaagccattcagctgcacttggcttattcgcacgatatccccaagatgttgccagtgcatcttctccgtgtatgcgtaccctgtaaatatttaatcaatgtattatgttataaaatttgattgaaagaaaattataacgaataaataaaatagattctcaccagccaacataagtggtttctttaaatgtttgcagtttgagttaccacgaagaaagttttgtgcaatgtggcgcaggcaaaagaaatgggatgtgtcctggacccataagttacttgggttgttgtaggcacttataattgaggggtgtcggtctgaaataagagaaatgttaatttgcggagtaacatgtcttctcaaattctttagaaaaaacccccaagctgaagttgtctccccttctacaatggcataggcaatcgggaagatatggttagctccatcttgtgcggtagctatcaacagtgtgccagtatactttccgtaaagccatgtaccatctacttgtacaatgggtttgcaatatgcaaaaccattaatgcatggaccaaatgaccaaaagacacgtttaaacaatcttttgcccggtactatttctcccccctcatacaaggattctgtttgagcagcgaccacagtcccgggaacacaagattgcaaagctccgaaaagttttggcagtttggcatatgattcttcccagtttccatgaatcatctccaatgctttttgctttgctaaccatgtcttcttgtaggatggggtataattcatgaacgttttgatctctgcaatcaatgtcttgatggagacagttgggtttgttttgacaattggttggatgatctgtgctatgacgtgtttgtcgagttggcgatgatcttgtctaagcatcggcacgagacaagtgtgatgacctctgatactcttgataatccatttgttatgcctctttgaattgcatgcgcccaagctccatgtacaaccattttcatgtaacttgcagacgaagtgtagccttctttggtcagagtaaattgttctgcaatcaaaatgatttctgatgttgtattctttgattgctcgaatacattgtgatttgtcatcgaaggtcatgccaacctcgagtacaccgactggtggttgtac

SEQ ID NO: 16099 - DNA, 1075 bp, Glycine max
  Gm_smallRNAprecursor_8932
gtgtatgcgtaccctgtaaatatttaatcaatgtattatgttataaaatttgattgaaagaaaattataacgaataaataaaatagattctcaccagccaacataagtggtttctttaaatgtttgcagtttgagttaccacgaagaaagttttgtgcaatgtggcgcaggcaaaagaaatgggatgtgtcctggacccataagttacttgggttgttgtaggcacttataattgaggggtgtcggtctgaaataagagaaatgttaatttgcggagtaacatgtcttctcaaattctttagaaaaaacccccaagctgaagttgtctccccttctacaatggcataggcaatcgggaagatatggttagctccatcttgtgcggtagctatcaacagtgtgccagtatactttccgtaaagccatgtaccatctacttgtacaatgggtttgcaatatgcaaaaccattaatgcatggaccaaatgaccaaaagacacgtttaaacaatcttttgcccggtactatttctcccccctcatacaaggattctgtttgagcagcgaccacagtcccgggaacacaagattgcaaagctccgaaaagttttggcagtttggcatatgattcttcccagtttccatgaatcatctccaatgctttttgctttgctaaccatgtcttcttgtaggatggggtataattcatgaacgttttgatctctgcaatcaatgtcttgatggagacagttgggtttgttttgacaattggttggatgatctgtgctatgacgtgtttgtcgagttggcgatgatcttgtctaagcatcggcacgagacaagtgtgatgacctctgatactcttgataatccatttgttatgcctctttgaattgcatgcgcccaagctccatgtacaaccattttcatgtaacttgcagacgaagtgtagccttctttggtcagagtaaattgttctgcaatcaaaatgatttctgatgttgtattctttgattgctcgaatacattgtgatttgtcatcgaaggtcatgccaacctcgagtacaccgactggtg

SEQ ID NO: 16100 - DNA, 1077 bp, Glycine max
  Gm_smallRNAprecursor_8933
gtgtatgcgtaccctgtaaatatttaatcaatgtattatgttataaaatttgattgaaagaaaattataacgaataaataaaatagattctcaccagccaacataagtggtttctttaaatgtttgcagtttgagttaccacgaagaaagttttgtgcaatgtggcgcaggcaaaagaaatgggatgtgtcctggacccataagttacttgggttgttgtaggcacttataattgaggggtgtcggtctgaaataagagaaatgttaatttgcggagtaacatgtcttctcaaattctttagaaaaaacccccaagctgaagttgtctccccttctacaatggcataggcaatcgggaagatatggttagctccatcttgtgcggtagctatcaacagtgtgccagtatactttccgtaaagccatgtaccatctacttgtacaatgggtttgcaatatgcaaaaccattaatgcatggaccaaatgaccaaaagacacgtttaaacaatcttttgcccggtactatttctcccccctcatacaaggattctgtttgagcagcgaccacagtcccgggaacacaagattgcaaagctccgaaaagttttggcagtttggcatatgattcttcccagtttccatgaatcatctccaatgctttttgctttgctaaccatgtcttcttgtaggatggggtataattcatgaacgttttgatctctgcaatcaatgtcttgatggagacagttgggtttgttttgacaattggttggatgatctgtgctatgacgtgtttgtcgagttggcgatgatcttgtctaagcatcggcacgagacaagtgtgatgacctctgatactcttgataatccatttgttatgcctctttgaattgcatgcgcccaagctccatgtacaaccattttcatgtaacttgcagacgaagtgtagccttctttggtcagagtaaattgttctgcaatcaaaatgatttctgatgttgtattctttgattgctcgaatacattgtgatttgtcatcgaaggtcatgccaacctcgagtacaccgactggtggt

SEQ ID NO: 16101 - DNA, 1078 bp, Glycine max
  Gm_smallRNAprecursor_8934
gtgtatgcgtaccctgtaaatatttaatcaatgtattatgttataaaatttgattgaaagaaaattataacgaataaataaaatagattctcaccagccaacataagtggtttctttaaatgtttgcagtttgagttaccacgaagaaagttttgtgcaatgtggcgcaggcaaaagaaatgggatgtgtcctggacccataagttacttgggttgttgtaggcacttataattgaggggtgtcggtctgaaataagagaaatgttaatttgcggagtaacatgtcttctcaaattctttagaaaaaacccccaagctgaagttgtctccccttctacaatggcataggcaatcgggaagatatggttagctccatcttgtgcggtagctatcaacagtgtgccagtatactttccgtaaagccatgtaccatctacttgtacaatgggtttgcaatatgcaaaaccattaatgcatggaccaaatgaccaaaagacacgtttaaacaatcttttgcccggtactatttctcccccctcatacaaggattctgtttgagcagcgaccacagtcccgggaacacaagattgcaaagctccgaaaagttttggcagtttggcatatgattcttcccagtttccatgaatcatctccaatgctttttgctttgctaaccatgtcttcttgtaggatggggtataattcatgaacgttttgatctctgcaatcaatgtcttgatggagacagttgggtttgttttgacaattggttggatgatctgtgctatgacgtgtttgtcgagttggcgatgatcttgtctaagcatcggcacgagacaagtgtgatgacctctgatactcttgataatccatttgttatgcctctttgaattgcatgcgcccaagctccatgtacaaccattttcatgtaacttgcagacgaagtgtagccttctttggtcagagtaaattgttctgcaatcaaaatgatttctgatgttgtattctttgattgctcgaatacattgtgatttgtcatcgaaggtcatgccaacctcgagtacaccgactggtggtt

SEQ ID NO: 16102 - DNA, 1063 bp, Glycine max
  Gm_smallRNAprecursor_8935
cgtaccctgtaaatatttaatcaatgtattatgttataaaatttgattgaaagaaaattataacgaataaataaaatagattctcaccagccaacataagtggtttctttaaatgtttgcagtttgagttaccacgaagaaagttttgtgcaatgtggcgcaggcaaaagaaatgggatgtgtcctggacccataagttacttgggttgttgtaggcacttataattgaggggtgtcggtctgaaataagagaaatgttaatttgcggagtaacatgtcttctcaaattctttagaaaaaacccccaagctgaagttgtctccccttctacaatggcataggcaatcgggaagatatggttagctccatcttgtgcggtagctatcaacagtgtgccagtatactttccgtaaagccatgtaccatctacttgtacaatgggtttgcaatatgcaaaaccattaatgcatggaccaaatgaccaaaagacacgtttaaacaatcttttgcccggtactatttctcccccctcatacaaggattctgtttgagcagcgaccacagtcccgggaacacaagattgcaaagctccgaaaagttttggcagtttggcatatgattcttcccagtttccatgaatcatctccaatgctttttgctttgctaaccatgtcttcttgtaggatggggtataattcatgaacgttttgatctctgcaatcaatgtcttgatggagacagttgggtttgttttgacaattggttggatgatctgtgctatgacgtgtttgtcgagttggcgatgatcttgtctaagcatcggcacgagacaagtgtgatgacctctgatactcttgataatccatttgttatgcctctttgaattgcatgcgcccaagctccatgtacaaccattttcatgtaacttgcagacgaagtgtagccttctttggtcagagtaaattgttctgcaatcaaaatgatttctgatgttgtattctttgattgctcgaatacattgtgatttgtcatcgaaggtcatgccaacctcgagtacaccgac

SEQ ID NO: 16103 - DNA, 1065 bp, Glycine max
  Gm_smallRNAprecursor_8936
cgtaccctgtaaatatttaatcaatgtattatgttataaaatttgattgaaagaaaattataacgaataaataaaatagattctcaccagccaacataagtggtttctttaaatgtttgcagtttgagttaccacgaagaaagttttgtgcaatgtggcgcaggcaaaagaaatgggatgtgtcctggacccataagttacttgggttgttgtaggcacttataattgaggggtgtcggtctgaaataagagaaatgttaatttgcggagtaacatgtcttctcaaattctttagaaaaaacccccaagctgaagttgtctccccttctacaatggcataggcaatcgggaagatatggttagctccatcttgtgcggtagctatcaacagtgtgccagtatactttccgtaaagccatgtaccatctacttgtacaatgggtttgcaatatgcaaaaccattaatgcatggaccaaatgaccaaaagacacgtttaaacaatcttttgcccggtactatttctcccccctcatacaaggattctgtttgagcagcgaccacagtcccgggaacacaagattgcaaagctccgaaaagttttggcagtttggcatatgattcttcccagtttccatgaatcatctccaatgctttttgctttgctaaccatgtcttcttgtaggatggggtataattcatgaacgttttgatctctgcaatcaatgtcttgatggagacagttgggtttgttttgacaattggttggatgatctgtgctatgacgtgtttgtcgagttggcgatgatcttgtctaagcatcggcacgagacaagtgtgatgacctctgatactcttgataatccatttgttatgcctctttgaattgcatgcgcccaagctccatgtacaaccattttcatgtaacttgcagacgaagtgtagccttctttggtcagagtaaattgttctgcaatcaaaatgatttctgatgttgtattctttgattgctcgaatacattgtgatttgtcatcgaaggtcatgccaacctcgagtacaccgactg

SEQ ID NO: 16104 - DNA, 1040 bp, Glycine max
  Gm_smallRNAprecursor_8937
agttgagaatgttggaatcaacaaagtgctcatagatggaggagcggctgttaacttaatgcctcgatctatgctccacaagatcgggaaacatgatactgatctatctgcccacaacattgtgctttcgaattatgaaggtaaaactggctattctttgggagccattcaagtagatgttgctgtaggcagtatagttcgaccaactctattcctggtgatacagtctaaggctaattttaacttgctattaggaagggaatggattcatggagttggggctgtgccatctacccttcaccagaaactcattatctggagggaggatgggattgttgaaaatatagaggcggatcaaagcttctataagtcagaggtcgataatgttactgcacaaacctttgacaaaaagttggctaacatagcaccttgtggtgacaaggaggctgttttcgaatcaagtgacaatgttgtccactctgtcaaactccatcctacctatgggtttatatgggagagggaggaaattgatgctgttccctctgaagatggagtcattccaccaactgggtggaatatgtatgaagattaatatgactgaggccactgcattggccagaattacggcttatatggccgaaaatagactaaatacggcctttgaggctgaatctcaacaaaatatggcagttgaagccaagatcgaagaacatgaaaataaagaaacaaaggatcgaagactggattgcatttatgacgatgagccgctgggtttcgagaaaaatcccgtaagtgaggtgccaaagatgcaggctcaagatcctttggaggagatcgacattggagatggctcgataaaaaggccaacctatatcagtgccaatatcacctcaagtctaaaagaaaagctggtgcctcttcttagagaattcaaagactgttttgcttgggattaccacgaaatgcctgggttaagcagagaaatggtcgaaatgaaattaccgattaaggagggaaaaagaccagtaaagcaactacca

SEQ ID NO: 16105 - DNA, 1157 bp, Glycine max
  Gm_smallRNAprecursor_8938
aagaccagtaaagcaactaccaaggagattcgcgccagaaatcatgtctaaaattaaggaagagatcgaaaggctgctgaagtgtaaattcatcagatccgccaggtatgtcgaatggttagcaaatatagtccctgtcattaaaaagaatggaactcttagagtatgcatagattttagggatttaaataatgctacacctaaagatgaatatgctatgccagtagcggaaatgttggtagattcggcagctggcttcgaatttttaagcatgttagatggttattctggttataaccaaatatttattgctgaaagtgatgtgtcgaaaacagcatttcgatgccctggtgctttaggcacttatgaatgggtggttatgccctttgggttgaaaaatgctggggccacttatcaaagggccatgaattctatgtttcatgattttattgacacatttatgcaagtttatattgatgatataatcatcaaatcctcttcagaagatagccatttggattaccttaggcaatctttcgaacgaatgaggaaacatggattaaaaatgaatccattaaaatgtgctttttgtgtgcgtgcaggagatttccttggttttgtggtgcataaaaaaggcattgagataaatcaaaataagacaaaggctattcttgagacgaagcctccttcgaccaaaaaacagcttcagtctttgctaggaaaaatcaacttcttgaggcgattcatttcgaatctaagtggcaaagctcaaattttttcgccattactttgactcaagaaagatgaaccattcaaatggaatgaagagcatcaaaaggctttcgatgaaattaaagaatatctgatcaagcctcctgtgttaatgcctcctagtcgaaacaagtctatgaagttgtatattgctgcgtctgacaagaccattggtagcatgttggctcaggaagatgatgatggcatagaacatgcaatttattatcttagtcgtgtactaaatgatgcagaaactagatatactgccatagaaaaactttgtctttgtctgtatttctcttgtgcaaaacttaagcaatatataaagcctgttgatgtttatgtgtattctcattatgatattattaagcacatgttgtcaaaac

SEQ ID NO: 16106 - DNA, 1114 bp, Glycine max
  Gm_smallRNAprecursor_8939
aatctaagtggcaaagctcaaattttttcgccattactttgactcaagaaagatgaaccattcaaatggaatgaagagcatcaaaaggctttcgatgaaattaaagaatatctgatcaagcctcctgtgttaatgcctcctagtcgaaacaagtctatgaagttgtatattgctgcgtctgacaagaccattggtagcatgttggctcaggaagatgatgatggcatagaacatgcaatttattatcttagtcgtgtactaaatgatgcagaaactagatatactgccatagaaaaactttgtctttgtctgtatttctcttgtgcaaaacttaagcaatatataaagcctgttgatgtttatgtgtattctcattatgatattattaagcacatgttgtcaaaacctattttacacagtagaatcggaaaatgggctttagcattaacagaatattctctaacgtacaagcctttgaaatctgttaagggtcaaattgtggcagattttattgtagatcactcagtggtcgaaatgccgcaagactatgtagatatagagccttggattttgtatttcgatggttcgaaacacaaacatggaactggaattggagttttaataatatcccccaataaagttccaactaaattcaaatataaaatcaaagggctttgttctaataatgaggctgagtatgaggctttaattacaggccttgaaattttaattagcctgggggcaagaaatgttaatataagaggtgattcagaattagtgttgaagcaattaacacaagaatacaaatgtgttaatgaacacttagcaaaatattttgttatggcgagttctcttctgaatcatttcgattacattaacattgagcatatacctcgacaagaaaaccaagaagcaaatgatttagcccaaatagcttcagggtacaaaatgtcgaaggaaaagttaactcagttgatcgaaataaaagataaattggtgttaccggagccattaagcactaaattgccaatgccaaaacttgtgggggcaagtataccacaaaataatgaagatgaaagcatgaatgatctccagggaaaaattcaaattttgg

SEQ ID NO: 16107 - DNA, 1110 bp, Glycine max
  Gm_smallRNAprecursor_8940
tattgtagatcactcagtggtcgaaatgccgcaagactatgtagatatagagccttggattttgtatttcgatggttcgaaacacaaacatggaactggaattggagttttaataatatcccccaataaagttccaactaaattcaaatataaaatcaaagggctttgttctaataatgaggctgagtatgaggctttaattacaggccttgaaattttaattagcctgggggcaagaaatgttaatataagaggtgattcagaattagtgttgaagcaattaacacaagaatacaaatgtgttaatgaacacttagcaaaatattttgttatggcgagttctcttctgaatcatttcgattacattaacattgagcatatacctcgacaagaaaaccaagaagcaaatgatttagcccaaatagcttcagggtacaaaatgtcgaaggaaaagttaactcagttgatcgaaataaaagataaattggtgttaccggagccattaagcactaaattgccaatgccaaaacttgtgggggcaagtataccacaaaataatgaagatgaaagcatgaatgatctccagggaaaaattcaaattttggccattgacaatatgttagataatgattggagaaagtccattattgaatatttggaaaatccaataggcaatgtggctcgaaagatcaaatatagggctttaaattacgtgattgtgggaaatgatttgtttaaaaagactgcagaaggagtgttgttaaaatgtctaagtgaatcagaaacatacttggcagtttcccatgttcacagtggggcctgtggatcgcatcaagcaggtcataaaatgaaatggcttctatttcgacaaggtctgtattggccttcgatgttaaaagactgcatagaatttgctaaaggctgtcaggaatgccaaaagcatgcagggattcagcatgtacctgctagtgagttacattccataatcaaaccttggcctttcagaggatgggctttggacttaattggtgaaattaagcctgcttcttctaagaaccagcgttatattatagttggtatcgattactttacaaaatggatcgaagcagt

SEQ ID NO: 16108 - DNA, 1082 bp, Glycine max
  Gm_smallRNAprecursor_8941
cagtggtcgaaatgccgcaagactatgtagatatagagccttggattttgtatttcgatggttcgaaacacaaacatggaactggaattggagttttaataatatcccccaataaagttccaactaaattcaaatataaaatcaaagggctttgttctaataatgaggctgagtatgaggctttaattacaggccttgaaattttaattagcctgggggcaagaaatgttaatataagaggtgattcagaattagtgttgaagcaattaacacaagaatacaaatgtgttaatgaacacttagcaaaatattttgttatggcgagttctcttctgaatcatttcgattacattaacattgagcatatacctcgacaagaaaaccaagaagcaaatgatttagcccaaatagcttcagggtacaaaatgtcgaaggaaaagttaactcagttgatcgaaataaaagataaattggtgttaccggagccattaagcactaaattgccaatgccaaaacttgtgggggcaagtataccacaaaataatgaagatgaaagcatgaatgatctccagggaaaaattcaaattttggccattgacaatatgttagataatgattggagaaagtccattattgaatatttggaaaatccaataggcaatgtggctcgaaagatcaaatatagggctttaaattacgtgattgtgggaaatgatttgtttaaaaagactgcagaaggagtgttgttaaaatgtctaagtgaatcagaaacatacttggcagtttcccatgttcacagtggggcctgtggatcgcatcaagcaggtcataaaatgaaatggcttctatttcgacaaggtctgtattggccttcgatgttaaaagactgcatagaatttgctaaaggctgtcaggaatgccaaaagcatgcagggattcagcatgtacctgctagtgagttacattccataatcaaaccttggcctttcagaggatgggctttggacttaattggtgaaattaagcctgcttcttctaagaaccagcgttatattatagttggtatcgattactttacaaaa

SEQ ID NO: 16109 - DNA, 1040 bp, Glycine max
  Gm_smallRNAprecursor_8942
agttgagaatgttggaatcaacaaagtgctcatagatggaggagcggctgtcaacttaatgcctcgatctatgctctacaagatcgggaaacatgacactgatctatctgcccacaacattgtgctttctaattatgagggcaaaactggctattctttgggagccattcaagtagatgttgctgtaggcagtatagttcgaccaactctattcttggtgatacagtccaaggctaattttaacttgctattaggaagggaatggatccatggagttggggctgtgccatctactctccaccagaaactcattatctggagggaggatgggattgttgaaaatatagaggcagatcaaagcttctataagtcagaggttgataatgttactccacaaacctttgacaaaaatttggctaacatagcaccttgtggtgacaaggagactgctttcgagccaagtgacaatgttatccactctgtcaaactccatcctacccatgggtttatatgggagagggaggaaattgatgctgtttcctctgaagatggagtcattccaccaactgggtggaatatatatgaagattaatatgcctgaggccactgcatgggccagaattacggcttatatggccgaaaatagactaaatacggcccttgaggctgaatcccaacaaaatatggcagttgaagccaagatcgaagatcatgaaaacaaagaaataaaggatcgaagactggactgcatttatgatgatgagccactgggttttgaaaaaaatcccataagtgaggcgccaaagatgcaggctcaagatcctttggaggagatcgacattggagatggctcgataaaaaggccaacctatatcagtgccaatatcacctcaagtctaaaagaaaagctggtgcctcttcttagagaatttaaagactgttttgcttgggattaccacgaaatgcctgggttaagcagagaaatggtcgaaatgaaattacctattaaggagggaaaaagaccagtaaaacaactacca

SEQ ID NO: 16110 - DNA, 1157 bp, Glycine max
  Gm_smallRNAprecursor_8943
aagaccagtaaaacaactaccaagaagattcgcaccagaaatcatgtccaagattaaggaagagatcgaaaggctgctgaggagtaaattcatcagatctgccaggtatgtcgaatggttagcaaatatagtccctgtcattaaaaagaatggaactcttagagtatgcatagattttagggatttaaataatgctacacctaaagatgaatatgctatgccagtagcagaaatgttggtagattcagcagctggcttcgaatttttaagcatgttagatggttattctggttataaccaaatatttattgctgaaagtgatgtgtcaaaaacagcatttcgatgccctggtgctttaggcacttatgaatgggtagttatgccctttgggttgaaaaatgctggggccacttatcaaagggccatgaattccatgtttcatgattttattgacacatttatgcaagtttatattgatgatataatcatcaaatcctcctcagaagatagccatttggattaccttaggcaatctttcgaacgaatgaggaaacatggattaaaaatgaatccattaaagtgtgctttttgtgtgcatgcaggagatttccttggttttgtggtgcataaaaaaggcattgagataaatcaaaacaagacaaaggctattcttgagacgaagcctccttcgaccaaaaaacagcttcagtctttgctaggaaaaatcaacttcttgaggcgattcatctcgaatctaagtggcaaagctcaaactttttcgccattacttcgactcaagaaagatgaaccattcaaatgggatgaagtgcatcaaaaggctttcgatgaaattaaagaatatctgatcaagcctcctgtgttaatgcctcctagtcgaaacaagactatgaagttgtatattgctgcgtctgacaagaccattggtagcatgttggctcaggaagatgatgatggcatagagcatgcaatttattatcttagtcgtgtactaaatgatgcagaaactagatatactgccatagaaaaactttgtctttgtttgtatttctcttgtgcaaaacttaagcaatatataaagcctgttgatgtttatgtatattctcattatgatattattaagcacatgttgtcaaaac

SEQ ID NO: 16111 - DNA, 1082 bp, Glycine max
  Gm_smallRNAprecursor_8944
cagtgatcgaaatgccgcaagactatgtcgatacagagccttggattttgtatttcaatggttcgaaacacaaacatggaactggaattggagttttaataatatccccaaataaagttccaactaaattcaaatataaaatcaaagggctttgttctaataatgaggctgagtatgaggctctaattacaggccttgaaattttaattagcttgggggcaagaaatgttaacataaggggtgattcagaattagtgttgaggcaattaacacaagaatataaatgtgttaatgaaaacttagcaaaatattttgttatggcaagttctcttctgaatcatttcgattacattaacattgagcatatacctcgacaagaaaaccaagaagcaaatgatttagcccaaatagcttcagggtacaaaatgtcgaaggaaaagttaactcagttgatcgaaataaaagataaactggtattactagagccattaggcactaaattgccaatgccaaaacttgtgggggcaagtacaccacaaaataatgaagatgaaagcatggatgatctccaggaaaaaattcaaattttggccattgacaatatgttagataatgattggagaaagtccattgttgaatatttggaaaatccaataggtaatgtggctcgaaaggtcaaatatagggctttaaattacgtggttgtgggaaatgatttgtttaaaaagactgcagaaggagtgttgctaaaatgtctaagtgaatcagaagcatacttggcagtttcccatgttcacagtggggcctgtggatcacatcaagcaggccataaaatgaaatggcttttattttgacaaggtttgtattggccttcgatgttaaaagactgcatagaatttgctaaaggctgtcaggaatgccaaaagcatgcagggatacagcatgtacctgctagtgagttacactccataatcaaaccttggcctttcagaggatgggctttggacttaattggtgaaatcaagcctgcttcttctaagaaccagcgttatatcatagttggtgttgattactttacaaaa

SEQ ID NO: 16112 - DNA, 1040 bp, Glycine max
  Gm_smallRNAprecursor_8945
agttgagaatgttggaatcaacaaagtgctcattgatggaggagcggctgtcaacttaatgcctcgatctatgctctacaagatcgggaaacatgacactgatctatctgcccacaacattgtgctttcgaattatgagggtaaaactggctattctttgggagccattcaagtagatgttgctgtaggcagtatagttcgaccaactcttttcctggtgatacagtctaaggctaattttaacttgctattaggaagggagtggattcatggagttggagctgtgccatctacccttcaccagaagctcattatctggagggaggatggaattgtggaaaatatagaggcggatcaaagcttctataagtcagaggtcgataatgttactgcacaaacctttgacaaaaagttggctaacatagcgccttgtggtgacaaggaggctgttgtcgaatcgagtgacaatgttgtccactctgtcaaactccatcctacctatgggtttatatgggagagggaggaaattaatgctgtcccctctgaagatggagtcattccaccaactgggtggaatatatatgaagattaatatgactaaggccactgcatgggccagaattacggcttatatggccgaaaatagactaaatacggcctttgaggctgaatttcaacaaaatatggcagttgaagccaagatcgaagatcatgaaaacaaagaaacaaaggatcgaagactggattgtatttatgatgatgagccgctgggttttgagaaaaatcccataagtgaggcgccaaagatgcaggctcaagatcctttggaagaggtcgatattggagatggctcgattaaaaggccaacttatatcagtgccaatatcacctcaagtttaaaagaaaagctggtgcctcttcttagagagtttaaagactgttttgcttgggattaccacgaaatgcctgggttaagcagaaaaatggtcgaaatgaagttacctattgaggagggaaaaagaccagtaaaacaactacca

SEQ ID NO: 16113 - DNA, 1157 bp, Glycine max
  Gm_smallRNAprecursor_8946
aagaccagtaaaacaactaccaagaagattcgcaccagaaatcatgtccaagatcaaggaagagatcgaaaggctgctgaggtgtaaattcatcagagctgccaggtatgtcgaatggttagcaaatatagtccctgtcattaaaaagaatggaactcttagagtatgcatagattttagggatttaaataatgctacacctaaagatgaatatgctatgccagtagcggaaatgttggtagattcggcagctggtttcgaatttttaagcatgttagatggttattctggttataaccaaatatttattgctgaaaatgatgtgtcgaaaacagcatttcgatgccctggtgctttaggcacttatgaatgggtggttatgccctttgggttgaaaaatgctggggccacttatcaaagggctatgaattccatgtttcatgattttattgacacatttatgcaaatttatattgatgatataatcatcaaatcctcctcagaagatagccatttggattatcttaggcaatctttcgaacgaatgaggaaacatggattaaaaatgaatccattaaaatgtgctttttgtgtgcgtgcaggagatttccttggttttgtggtgcataaaaaaggcattgagataaatcaaaataagacaaaggctattcttgagacgaagcctccttcgactaaaaaacagcttcagtctttgctaggaaaaatcaacttcttgaggcgattcatttcgaatctaagtggcaaagctcagattttttcgccattacttcgactcaagaaagatgaaccattcaaatggaatgaagagcatcaaaaggctttcgatgaaattaaagaatatctgatcaagcctcctgtgttaatgcctcctagtcgaaacaagtttatgaaattgtatattgctgcgtctgacaagaccattggtagcatgttggctcaggaagatgatgatagcatagaacatgcaatttattatcttagtcgtgtactaaatgatgcagaaactagatatactgccatagaaaaactttgtctttgtctgtatttctcttgtgcaaaacttaagcaatatataaagcctgttgatgtttatgtgtattctcattatgatgttattaagcacatgttgtcaaaac

SEQ ID NO: 16114 - DNA, 1114 bp, Glycine max
  Gm_smallRNAprecursor_8947
aatctaagtggcaaagctcagattttttcgccattacttcgactcaagaaagatgaaccattcaaatggaatgaagagcatcaaaaggctttcgatgaaattaaagaatatctgatcaagcctcctgtgttaatgcctcctagtcgaaacaagtttatgaaattgtatattgctgcgtctgacaagaccattggtagcatgttggctcaggaagatgatgatagcatagaacatgcaatttattatcttagtcgtgtactaaatgatgcagaaactagatatactgccatagaaaaactttgtctttgtctgtatttctcttgtgcaaaacttaagcaatatataaagcctgttgatgtttatgtgtattctcattatgatgttattaagcacatgttgtcaaaaccgattttacacagtagaattggaaaatgggctttagcattaacagaatattctttaacgtacaagcctttgaaatctgttaagggtcaaattgtggcagattttattgtagatcactcagtggtcgaaatgtcgcaagactatgtcgatacagagccatggattttgtatttcgatggttcgaaacacaaacatggaactggaattggagttttaataatatcccccaataaaattccaactaaattcaagtataaaatcaaagggctttgttctaataatgaggctgagtatgaagctctaattacaggccttgaaattttaattagcctgggggcaagaaatgttaatataagaggtgattcagaattagtgttgaggcaattaacacaagaatacaaatgtgttaatgaacacttagcaaaatattttgttatagcaagttctcttctgaatcatttcgattatattaacattgagcatgtacctcgacaagaaaaccgagaagcaaatgatttagcccaaatagcttcagggtacaaaatgtcgaaggaaaagttaactcggttgatcgaaataaaagataaattggtgttaccagagccattaagcactaaattgccaatgccaaaacttgtgggggcaagtataccacaaaataatgaagatgaaagtatgaatgatcttcaggaaaaaattcaaattttgg

SEQ ID NO: 16115 - DNA, 1110 bp, Glycine max
  Gm_smallRNAprecursor_8948
tattgtagatcactcagtggtcgaaatgtcgcaagactatgtcgatacagagccatggattttgtatttcgatggttcgaaacacaaacatggaactggaattggagttttaataatatcccccaataaaattccaactaaattcaagtataaaatcaaagggctttgttctaataatgaggctgagtatgaagctctaattacaggccttgaaattttaattagcctgggggcaagaaatgttaatataagaggtgattcagaattagtgttgaggcaattaacacaagaatacaaatgtgttaatgaacacttagcaaaatattttgttatagcaagttctcttctgaatcatttcgattatattaacattgagcatgtacctcgacaagaaaaccgagaagcaaatgatttagcccaaatagcttcagggtacaaaatgtcgaaggaaaagttaactcggttgatcgaaataaaagataaattggtgttaccagagccattaagcactaaattgccaatgccaaaacttgtgggggcaagtataccacaaaataatgaagatgaaagtatgaatgatcttcaggaaaaaattcaaattttggccattgacaatatgttagataatgattggagaaagtccattattgaatatttggaaaatccaataggcaatgtggctcgaaagatcaaatatagggctttaaattacgtgattatgggaaatgatttgtttaaaaagactgcagaaggagtgttgttaaaatgtctaaatgaatcagaagcatacttagcagtttcccatgttcacagtggggcttgtggatcacatcaagcaggccataaaatgaaatggcttttatttcgacaaggtttgtattggccttcgatgttaaaagactgcatagaatttgctaaaggctgtcaggaatgccaaaagcatgcagggatacagcatgtacctgctagtgagttacactccataatcaaaccttggcctttcagaggatgggctttggatttaattggcgaaatcaagcctgcttcttctaagaaccagcgttatattatagttggtatcgattactttacaaaatggatcgaagcagt

SEQ ID NO: 16116 - DNA, 1082 bp, Glycine max
  Gm_smallRNAprecursor_8949
cagtggtcgaaatgtcgcaagactatgtcgatacagagccatggattttgtatttcgatggttcgaaacacaaacatggaactggaattggagttttaataatatcccccaataaaattccaactaaattcaagtataaaatcaaagggctttgttctaataatgaggctgagtatgaagctctaattacaggccttgaaattttaattagcctgggggcaagaaatgttaatataagaggtgattcagaattagtgttgaggcaattaacacaagaatacaaatgtgttaatgaacacttagcaaaatattttgttatagcaagttctcttctgaatcatttcgattatattaacattgagcatgtacctcgacaagaaaaccgagaagcaaatgatttagcccaaatagcttcagggtacaaaatgtcgaaggaaaagttaactcggttgatcgaaataaaagataaattggtgttaccagagccattaagcactaaattgccaatgccaaaacttgtgggggcaagtataccacaaaataatgaagatgaaagtatgaatgatcttcaggaaaaaattcaaattttggccattgacaatatgttagataatgattggagaaagtccattattgaatatttggaaaatccaataggcaatgtggctcgaaagatcaaatatagggctttaaattacgtgattatgggaaatgatttgtttaaaaagactgcagaaggagtgttgttaaaatgtctaaatgaatcagaagcatacttagcagtttcccatgttcacagtggggcttgtggatcacatcaagcaggccataaaatgaaatggcttttatttcgacaaggtttgtattggccttcgatgttaaaagactgcatagaatttgctaaaggctgtcaggaatgccaaaagcatgcagggatacagcatgtacctgctagtgagttacactccataatcaaaccttggcctttcagaggatgggctttggatttaattggcgaaatcaagcctgcttcttctaagaaccagcgttatattatagttggtatcgattactttacaaaa

SEQ ID NO: 16117 - DNA, 1086 bp, Glycine max
  Gm_smallRNAprecursor_8950
gcttctgaatcgaatcagcagccttctcctggagttctttgcgtttggcctgctctgttacaattttctgccttagatcatcgacctgagacagcaaatttgtaatagttgcctcccaggaggagatgttatcatcacaggctttgatctcagaagatccttctttcgcctctttggtgagacgctcgacttcacgttgagccgctcgggctttctcgagcagaaggatatgtgcctgtttctgggcatcgagtctggcgccattttcgcgttttttctgcacagtatttgcaaattgatcgataatggactcgatttgtataactttgcccagaatctcatcagaagtaagggggttatgcaatttcttcaaaaagttcaggtgtccaaaagcagcagaagggttctcttcaatggatttaagtacgtctgcccgtgcgtattccattgataacttcaaaagcaggcaatcttggcgtactgtagaggttatatcagcatcagatgaggacgaagcaccaggattcttttcacttgaggtgttggcttgactggtgttcagcaggagtcgaagggctgcagcagggtcttcgtcttgcatttgaatgaatgtatcctctgcgatccctatgctagcggaaagcttagatgtcgaagacgctgggaaaatgtctgaacctccagcttcagcctcttgtatggcctcttcatcggaaaagtgttcttcagatgaacttctctgactcgatccctgaggactgctgggtccaatgccttgaccttcaccctgttcctcaacattcactgcatccgtctcaggagcaggagaggttcgagcacatgagggtatttcttctacagaaacattttgttgtacctgattcgaattgtcatggaaaaggttaacaaatagtttcgtattagttatgattaaaatcatattaagaatgatacctcgacggtagggtgttcttgtggtaagtccggttgttcgacaaggttgcccatctcagcaatagagggagtagtttctgtttcagcgccgccaacatcagtcgaaggtggttggacgtcaacaggttgatt

SEQ ID NO: 16118 - DNA, 1087 bp, Glycine max
  Gm_smallRNAprecursor_8951
acaaattatatttttgaagagttaagttataagatttgtcattaaattatttataatactaatttatcatacttttttatacattcaaaaattaaatttaaaattttctttttttcagaactaatttatcagtttttttaattacaaactatttatctaatattttattaccatcaagtgaaagaagttgaacggcagagattgcattgtgtgtttgacgacagagaatccaaagttgaattggttgggaagattggtgtaggtgttgataagaaaataaagacatggcgggtagggtaggggtccataaattaataatgaagggtctgctgtcaccgttttcttcactccataccaagtcaggcatgtgttttcaacacagctcacatcctctttatatatattcatgtattgttaaccaaccacttccactagatgtgaatgtgattcatattcatagagagagaaagggaaagggagaagagcttgaggaagtgatgggagatgggagggtcggtaaagaatatatctgagactcgactcaatctcgatctctctcagtgttgtgttgttttgtttatccttttgccgattccacccattcctatgatttccttcggttcctctctttccactctcctctccgctctttcctcttgttatggtaagcacctttcttcttcagatctgctctttataccatacacttattatagatctaagtttttatggaccttaactatcttccttgatctcttattaattttaaccgctctctctttgttgctggacatgttacttcaagataacaaattgcttttttatttttcatcttttctctcgttctcttgtttaaggtttctataaatcatcgatgagatacctataataatatacttattacagacagatgctaattaatttagctggctccaaaagatgtttaaatatttttggatggattcgtagatccatgtatccatatcaagctgaaccaaatccaaataattttactggacacttttaaaggttttggtgcgcttataatggctaacaaagttttctttcttgatttctaactaagtta

SEQ ID NO: 16119 - DNA, 1085 bp, Glycine max
  Gm_smallRNAprecursor_8952
caaattatatttttgaagagttaagttataagatttgtcattaaattatttataatactaatttatcatacttttttatacattcaaaaattaaatttaaaattttctttttttcagaactaatttatcagtttttttaattacaaactatttatctaatattttattaccatcaagtgaaagaagttgaacggcagagattgcattgtgtgtttgacgacagagaatccaaagttgaattggttgggaagattggtgtaggtgttgataagaaaataaagacatggcgggtagggtaggggtccataaattaataatgaagggtctgctgtcaccgttttcttcactccataccaagtcaggcatgtgttttcaacacagctcacatcctctttatatatattcatgtattgttaaccaaccacttccactagatgtgaatgtgattcatattcatagagagagaaagggaaagggagaagagcttgaggaagtgatgggagatgggagggtcggtaaagaatatatctgagactcgactcaatctcgatctctctcagtgttgtgttgttttgtttatccttttgccgattccacccattcctatgatttccttcggttcctctctttccactctcctctccgctctttcctcttgttatggtaagcacctttcttcttcagatctgctctttataccatacacttattatagatctaagtttttatggaccttaactatcttccttgatctcttattaattttaaccgctctctctttgttgctggacatgttacttcaagataacaaattgcttttttatttttcatcttttctctcgttctcttgtttaaggtttctataaatcatcgatgagatacctataataatatacttattacagacagatgctaattaatttagctggctccaaaagatgtttaaatatttttggatggattcgtagatccatgtatccatatcaagctgaaccaaatccaaataattttactggacacttttaaaggttttggtgcgcttataatggctaacaaagttttctttcttgatttctaactaagtt

SEQ ID NO: 16120 - DNA, 1086 bp, Glycine max
  Gm_smallRNAprecursor_8953
caaattatatttttgaagagttaagttataagatttgtcattaaattatttataatactaatttatcatacttttttatacattcaaaaattaaatttaaaattttctttttttcagaactaatttatcagtttttttaattacaaactatttatctaatattttattaccatcaagtgaaagaagttgaacggcagagattgcattgtgtgtttgacgacagagaatccaaagttgaattggttgggaagattggtgtaggtgttgataagaaaataaagacatggcgggtagggtaggggtccataaattaataatgaagggtctgctgtcaccgttttcttcactccataccaagtcaggcatgtgttttcaacacagctcacatcctctttatatatattcatgtattgttaaccaaccacttccactagatgtgaatgtgattcatattcatagagagagaaagggaaagggagaagagcttgaggaagtgatgggagatgggagggtcggtaaagaatatatctgagactcgactcaatctcgatctctctcagtgttgtgttgttttgtttatccttttgccgattccacccattcctatgatttccttcggttcctctctttccactctcctctccgctctttcctcttgttatggtaagcacctttcttcttcagatctgctctttataccatacacttattatagatctaagtttttatggaccttaactatcttccttgatctcttattaattttaaccgctctctctttgttgctggacatgttacttcaagataacaaattgcttttttatttttcatcttttctctcgttctcttgtttaaggtttctataaatcatcgatgagatacctataataatatacttattacagacagatgctaattaatttagctggctccaaaagatgtttaaatatttttggatggattcgtagatccatgtatccatatcaagctgaaccaaatccaaataattttactggacacttttaaaggttttggtgcgcttataatggctaacaaagttttctttcttgatttctaactaagtta

SEQ ID NO: 16121 - DNA, 1077 bp, Glycine max
  Gm_smallRNAprecursor_8954
cagtttacataacatcactgaattaattttctgagccaactcaactgatcctcaatgcatcagccagtcaaactggctaaaagactaatttgggggatacacaactcaacctgtaatacaattactaaatcaataggtttaatccattaaatgttgttaataatacaactattcaacacacctgattccttgatatgactgataatattgcttctttctttttataagcagggagacttctgcgaaattctagcattcttcttccttcaggagattcctgaaatgagagggcaagatgtcaagaacattcaagacaattttgttttgtctcaatggtttctaaaactcattggatatttttcaaaatattaaacagagattcagggaaaaccatcaacacacagctaaaaccggtatctgtaagcaccaatgttgttaatggcggatggcggttcatggcggaaagtaaaaaatccgccataaaaatatggcggatggcgtagcggaaaatggcggatgtcatggcggaccaaaaaaaaaaaagcatatatataaactcattgaaattgaaaaaaacaaaggattgcattcaaataaactaaaaaagtttcatgagttcatacaataatcaagtaccaacaccaaataaactcattaaagagttcaaataaactcagccatttaaaagaggactgaacagaaaaaaaaaattgtggtgtcaaatatgaaaaataaaatgggactgttaaaagtaaaaaggggtatcaaatagcaaaagaaaaaaaaaagctgcaaacagaaaacagggggtgtcaaacagcaaaaaaaaaactaaaacctatgccttcttcttcttcgcgacagcttcgtcttctccgcgagaacttctcgctgcaggccgccgttcgtgacaggtgcgtcgctgccggagctcgtcgccgccatttgtgccggtgcgtcgctgccggaggtcgtcgcggctgcgtgcgcgtgcggctgcgggtgtcgcggctgggtgcgcgtgtggggtgcgggagggacgccattttccgccaccccgccataaccgccacgacc

SEQ ID NO: 16122 - DNA, 1051 bp, Glycine max
  Gm_smallRNAprecursor_8955
tattaatgcacttgtaatatatatagaaaaacactcgctatcttgtctgcaaactgcatggtggtggtgttggcgtgacaatattcaatttgcatcactagggaccactttttacctcttttaatttgttttcattttaataacttctccaatggctttacaccctccctaatattccgttacttatagataacaaatattaaaagtttaaacaaagggtggggaggcaaaaggattaataaataaataagaaaattaaattaaaagaaccccttcaaattttcgcatagatttctttcttaatttctccctgatcgctgctatatataatagtggctcttcctactctcttctccatccaaaccctagctagcaaaagcagcagttaaaacctcccttcaactcccaatctcatcatcatcatatcattaccttttagaacacttgttctggttcttgttcttcccaatatctgtctaccatcatgcaccactaccagttgaagctgccagcatgatcttaacttccctcacttgccgtggaaagatcagatcatgtggcagtttcacctagtagttgctggccgcatgaaccctagtttgttagtttggctacctttctctctattgtgtgtttaattatgtgtgtgccctctaggattttttcttttcttgtttgtaattaatataacagaacaaaagtgtgactagtgaggaatggattcttatcttctttttctctcatctgggttcttacttctatgtcagcatggcatatataactgatagctcattatttcccccttatttattttcttggataagagaagggtatctggatatgagatattttttaattatttttttttccttctgccactgcgtgaaattgaataacctttaggtgctaaatcttaattgtatgattgttagggtttagagagacaggaattgttttgcgtggctcggtgcaatgcattcgtgatttcaaaatccgatccgtgcttcggtgtctgagcctccattacatcggaattgtaatataccttttt

SEQ ID NO: 16123 - DNA, 1051 bp, Glycine max; identical to SEQ ID NO: 16122
  Gm_smallRNAprecursor_8956

SEQ ID NO: 16124 - DNA, 1049 bp, Glycine max
  Gm_smallRNAprecursor_8957
ttaatgcacttgtaatatatatagaaaaacactcgctatcttgtctgcaaactgcatggtggtggtgttggcgtgacaatattcaatttgcatcactagggaccactttttacctcttttaatttgttttcattttaataacttctccaatggctttacaccctccctaatattccgttacttatagataacaaatattaaaagtttaaacaaagggtggggaggcaaaaggattaataaataaataagaaaattaaattaaaagaaccccttcaaattttcgcatagatttctttcttaatttctccctgatcgctgctatatataatagtggctcttcctactctcttctccatccaaaccctagctagcaaaagcagcagttaaaacctcccttcaactcccaatctcatcatcatcatatcattaccttttagaacacttgttctggttcttgttcttcccaatatctgtctaccatcatgcaccactaccagttgaagctgccagcatgatcttaacttccctcacttgccgtggaaagatcagatcatgtggcagtttcacctagtagttgctggccgcatgaaccctagtttgttagtttggctacctttctctctattgtgtgtttaattatgtgtgtgccctctaggattttttcttttcttgtttgtaattaatataacagaacaaaagtgtgactagtgaggaatggattcttatcttctttttctctcatctgggttcttacttctatgtcagcatggcatatataactgatagctcattatttcccccttatttattttcttggataagagaagggtatctggatatgagatattttttaattatttttttttccttctgccactgcgtgaaattgaataacctttaggtgctaaatcttaattgtatgattgttagggtttagagagacaggaattgttttgcgtggctcggtgcaatgcattcgtgatttcaaaatccgatccgtgcttcggtgtctgagcctccattacatcggaattgtaatataccttttt

SEQ ID NO: 16125 - DNA, 1151 bp, Glycine max
  Gm_smallRNAprecursor_8958
tataaagccgagtgaattgcagctcgtgcagaaagcaatatatcaaccgcctctacatgagaagatccttgcaaatactggggaattgatggtggtggcttcccataagtgacttcgaaaggtgagaggcctgtgctggggtgtacagatgtattgtacgaccattccgcaagggacaagaatttaaaccattgtgatggtctaccatgaacgaacaaatgtaggtattactccaatacccaattgaggacctccgtttgtccgtcagtctgtgagtgatatgtcgtgctcatgcgaagcttaattccacttacccaaaaacattgataaacaggggatccttatttgacaccaagctacgtgggaacccgtgtgatttgcagaccatatccaggaaaaagaactacaaccttgtgctcagtgtaatgggaagtaagagcaccaaaatgggccctttttgaataacggtccatgaccacctggattgaggttaatccatttgatggaggcaatcctgtaatgaaggccaggaacaagtcttcccatatggacgaagagataggtaaatgttgaagtaggcctgtgggtttcttggcttcaacctttaccaatcccttcgtccatatgggaagacttgtctctcgacttcattataggattgcctccatcaaacgaattcacctcaatcttggtggtcgtggatcgttattcaaaaaaggacccatttcgatgcttcccatcccactgcgcataaggtagcagttcttttcctgtatatggtatggaaattacatgggttcccacgtagcttggtgtcggatagcgaccccctattcatcaatgttttttgacacaaactgttccggataagtggaaccaagctttgcatgaacatgacatatcacccacagactaatgggtagacggaggtcctcaattgggtattggagtaatacctacattcgttcgttcatggtagaccatcacaatggtttaaattcttatccctcacggaatgttcatacaatacatctgtacactccagcacaagcctctcacctttcgaagtcacttgtgggaagctaccaccatcaattacccggtatttgcaaggatcctctcacgtagaggtggttgatacattgctttcg

SEQ ID NO: 16126 - DNA, 1063 bp, Glycine max
  Gm_smallRNAprecursor_8959
aaccgcctctacatgagaagatccttgcaaatactggggaattgatggtggtggcttcccataagtgacttcgaaaggtgagaggcctgtgctggggtgtacagatgtattgtacgaccattccgcaagggacaagaatttaaaccattgtgatggtctaccatgaacgaacaaatgtaggtattactccaatacccaattgaggacctccgtttgtccgtcagtctgtgagtgatatgtcgtgctcatgcgaagcttaattccacttacccaaaaacattgataaacaggggatccttatttgacaccaagctacgtgggaacccgtgtgatttgcagaccatatccaggaaaaagaactacaaccttgtgctcagtgtaatgggaagtaagagcaccaaaatgggccctttttgaataacggtccatgaccacctggattgaggttaatccatttgatggaggcaatcctgtaatgaaggccaggaacaagtcttcccatatggacgaagagataggtaaatgttgaagtaggcctgtgggtttcttggcttcaacctttaccaatcccttcgtccatatgggaagacttgtctctcgacttcattataggattgcctccatcaaacgaattcacctcaatcttggtggtcgtggatcgttattcaaaaaaggacccatttcgatgcttcccatcccactgcgcataaggtagcagttcttttcctgtatatggtatggaaattacatgggttcccacgtagcttggtgtcggatagcgaccccctattcatcaatgttttttgacacaaactgttccggataagtggaaccaagctttgcatgaacatgacatatcacccacagactaatgggtagacggaggtcctcaattgggtattggagtaatacctacattcgttcgttcatggtagaccatcacaatggtttaaattcttatccctcacggaatgttcatacaatacatctgtacactccagcacaagcctctcacctttcgaagtcacttgtgggaagctaccaccatcaattacccggtatt

SEQ ID NO: 16127 - DNA, 1060 bp, Glycine max
  Gm_smallRNAprecursor_8960
catttgattatgactaagttccattctctatagatctccctgaagcctgtgcttcccccaccctcaactcaatatatactacctccatctcctccttcactcttactctccatccccttctacctcttagcaattctttcttttgtccctttctctcctttccccccctctacctatctccaccttcatcttcgtccccatcaaggactatctatctatacatctaggtttgatcatccatcatctttttcatgttaaccatatagtagctaggtctattattccttgcactcatcacttttatatatacattgtttaaaaagtacacatcatatagtcatgcatcattgataacttatatatccttaggattagttgtagctaattagaatatatagagagagaaaaaaaacttgatgttgtacatgtatgtctaattacactcatgcttagttaattacttttttaattgtgtcacatcatgcatacatatgtgtatgtgcctggctccctgtatgccatttgcatagttcattgagcatcaatgatctttgtgaatggcgtatgaggagccaagcatattccatgtacattcatggagatgatcatgatcgaattttaatttatatatgtgagtaaattaaagagtatgtaagtaggctcttgcactataatggtgtaggttttttaaaagaattatcataatagatatatttttaaaaaattacgaaaataaataaattgtgctttgaaatatgatttcactatgaaaactcatgtttagatcattttggttttcaaaaaattattatactgaaattatatatgcacatacgattgtagtttttttaatttttttattattaagaattgaaatcaatcatgttaaaatacgatttcaacatatttttttaattatttcagaaatcatattttaacataccatctcattagaaaaaaactaaaatcatattttaacatataattttaatttttagaaaaaaatattttaaacaaatgaaaagtgaaatcttattttgatatatgattttttattgtg

SEQ ID NO: 16128 - DNA, 1060 bp, Glycine max; identical to SEQ ID NO: 16127
  Gm_smallRNAprecursor_8961

SEQ ID NO: 16129 - DNA, 1060 bp, Glycine max; identical to SEQ ID NO: 16127
  Gm_smallRNAprecursor_8962

SEQ ID NO: 16130 - DNA, 1061 bp, Glycine max
  Gm_smallRNAprecursor_8963
catttgattatgactaagttccattctctatagatctccctgaagcctgtgcttcccccaccctcaactcaatatatactacctccatctcctccttcactcttactctccatccccttctacctcttagcaattctttcttttgtccctttctctcctttccccccctctacctatctccaccttcatcttcgtccccatcaaggactatctatctatacatctaggtttgatcatccatcatctttttcatgttaaccatatagtagctaggtctattattccttgcactcatcacttttatatatacattgtttaaaaagtacacatcatatagtcatgcatcattgataacttatatatccttaggattagttgtagctaattagaatatatagagagagaaaaaaaacttgatgttgtacatgtatgtctaattacactcatgcttagttaattacttttttaattgtgtcacatcatgcatacatatgtgtatgtgcctggctccctgtatgccatttgcatagttcattgagcatcaatgatctttgtgaatggcgtatgaggagccaagcatattccatgtacattcatggagatgatcatgatcgaattttaatttatatatgtgagtaaattaaagagtatgtaagtaggctcttgcactataatggtgtaggttttttaaaagaattatcataatagatatatttttaaaaaattacgaaaataaataaattgtgctttgaaatatgatttcactatgaaaactcatgtttagatcattttggttttcaaaaaattattatactgaaattatatatgcacatacgattgtagtttttttaatttttttattattaagaattgaaatcaatcatgttaaaatacgatttcaacatatttttttaattatttcagaaatcatattttaacataccatctcattagaaaaaaactaaaatcatattttaacatataattttaatttttagaaaaaaatattttaaacaaatgaaaagtgaaatcttattttgatatatgattttttattgtga

SEQ ID NO: 16131 - DNA, 1061 bp, Glycine max; identical to SEQ ID NO: 16130
  Gm_smallRNAprecursor_8964

SEQ ID NO: 16132 - DNA, 1061 bp, Glycine max; identical to SEQ ID NO: 16130
  Gm_smallRNAprecursor_8965

SEQ ID NO: 16133 - DNA, 1062 bp, Glycine max
  Gm_smallRNAprecursor_8966
catttgattatgactaagttccattctctatagatctccctgaagcctgtgcttcccccaccctcaactcaatatatactacctccatctcctccttcactcttactctccatccccttctacctcttagcaattctttcttttgtccctttctctcctttccccccctctacctatctccaccttcatcttcgtccccatcaaggactatctatctatacatctaggtttgatcatccatcatctttttcatgttaaccatatagtagctaggtctattattccttgcactcatcacttttatatatacattgtttaaaaagtacacatcatatagtcatgcatcattgataacttatatatccttaggattagttgtagctaattagaatatatagagagagaaaaaaaacttgatgttgtacatgtatgtctaattacactcatgcttagttaattacttttttaattgtgtcacatcatgcatacatatgtgtatgtgcctggctccctgtatgccatttgcatagttcattgagcatcaatgatctttgtgaatggcgtatgaggagccaagcatattccatgtacattcatggagatgatcatgatcgaattttaatttatatatgtgagtaaattaaagagtatgtaagtaggctcttgcactataatggtgtaggttttttaaaagaattatcataatagatatatttttaaaaaattacgaaaataaataaattgtgctttgaaatatgatttcactatgaaaactcatgtttagatcattttggttttcaaaaaattattatactgaaattatatatgcacatacgattgtagtttttttaatttttttattattaagaattgaaatcaatcatgttaaaatacgatttcaacatatttttttaattatttcagaaatcatattttaacataccatctcattagaaaaaaactaaaatcatattttaacatataattttaatttttagaaaaaaatattttaaacaaatgaaaagtgaaatcttattttgatatatgattttttattgtgaa

SEQ ID NO: 16134 - DNA, 1062 bp, Glycine max; identical to SEQ ID NO: 16133
  Gm_smallRNAprecursor_8967

SEQ ID NO: 16135 - DNA, 1062 bp, Glycine max; identical to SEQ ID NO: 16133
  Gm_smallRNAprecursor_8968

SEQ ID NO: 16136 - DNA, 1059 bp, Glycine max
  Gm_smallRNAprecursor_8969
atttgattatgactaagttccattctctatagatctccctgaagcctgtgcttcccccaccctcaactcaatatatactacctccatctcctccttcactcttactctccatccccttctacctcttagcaattctttcttttgtccctttctctcctttccccccctctacctatctccaccttcatcttcgtccccatcaaggactatctatctatacatctaggtttgatcatccatcatctttttcatgttaaccatatagtagctaggtctattattccttgcactcatcacttttatatatacattgtttaaaaagtacacatcatatagtcatgcatcattgataacttatatatccttaggattagttgtagctaattagaatatatagagagagaaaaaaaacttgatgttgtacatgtatgtctaattacactcatgcttagttaattacttttttaattgtgtcacatcatgcatacatatgtgtatgtgcctggctccctgtatgccatttgcatagttcattgagcatcaatgatctttgtgaatggcgtatgaggagccaagcatattccatgtacattcatggagatgatcatgatcgaattttaatttatatatgtgagtaaattaaagagtatgtaagtaggctcttgcactataatggtgtaggttttttaaaagaattatcataatagatatatttttaaaaaattacgaaaataaataaattgtgctttgaaatatgatttcactatgaaaactcatgtttagatcattttggttttcaaaaaattattatactgaaattatatatgcacatacgattgtagtttttttaatttttttattattaagaattgaaatcaatcatgttaaaatacgatttcaacatatttttttaattatttcagaaatcatattttaacataccatctcattagaaaaaaactaaaatcatattttaacatataattttaatttttagaaaaaaatattttaaacaaatgaaaagtgaaatcttattttgatatatgattttttattgtg

SEQ ID NO: 16137 - DNA, 1059 bp, Glycine max; identical to SEQ ID NO: 16136
  Gm_smallRNAprecursor_8970

SEQ ID NO: 16138 - DNA, 1060 bp, Glycine max
  Gm_smallRNAprecursor_8971
atttgattatgactaagttccattctctatagatctccctgaagcctgtgcttcccccaccctcaactcaatatatactacctccatctcctccttcactcttactctccatccccttctacctcttagcaattctttcttttgtccctttctctcctttccccccctctacctatctccaccttcatcttcgtccccatcaaggactatctatctatacatctaggtttgatcatccatcatctttttcatgttaaccatatagtagctaggtctattattccttgcactcatcacttttatatatacattgtttaaaaagtacacatcatatagtcatgcatcattgataacttatatatccttaggattagttgtagctaattagaatatatagagagagaaaaaaaacttgatgttgtacatgtatgtctaattacactcatgcttagttaattacttttttaattgtgtcacatcatgcatacatatgtgtatgtgcctggctccctgtatgccatttgcatagttcattgagcatcaatgatctttgtgaatggcgtatgaggagccaagcatattccatgtacattcatggagatgatcatgatcgaattttaatttatatatgtgagtaaattaaagagtatgtaagtaggctcttgcactataatggtgtaggttttttaaaagaattatcataatagatatatttttaaaaaattacgaaaataaataaattgtgctttgaaatatgatttcactatgaaaactcatgtttagatcattttggttttcaaaaaattattatactgaaattatatatgcacatacgattgtagtttttttaatttttttattattaagaattgaaatcaatcatgttaaaatacgatttcaacatatttttttaattatttcagaaatcatattttaacataccatctcattagaaaaaaactaaaatcatattttaacatataattttaatttttagaaaaaaatattttaaacaaatgaaaagtgaaatcttattttgatatatgattttttattgtga

SEQ ID NO: 16139 - DNA, 1061 bp, Glycine max
  Gm_smallRNAprecursor_8972
atttgattatgactaagttccattctctatagatctccctgaagcctgtgcttcccccaccctcaactcaatatatactacctccatctcctccttcactcttactctccatccccttctacctcttagcaattctttcttttgtccctttctctcctttccccccctctacctatctccaccttcatcttcgtccccatcaaggactatctatctatacatctaggtttgatcatccatcatctttttcatgttaaccatatagtagctaggtctattattccttgcactcatcacttttatatatacattgtttaaaaagtacacatcatatagtcatgcatcattgataacttatatatccttaggattagttgtagctaattagaatatatagagagagaaaaaaaacttgatgttgtacatgtatgtctaattacactcatgcttagttaattacttttttaattgtgtcacatcatgcatacatatgtgtatgtgcctggctccctgtatgccatttgcatagttcattgagcatcaatgatctttgtgaatggcgtatgaggagccaagcatattccatgtacattcatggagatgatcatgatcgaattttaatttatatatgtgagtaaattaaagagtatgtaagtaggctcttgcactataatggtgtaggttttttaaaagaattatcataatagatatatttttaaaaaattacgaaaataaataaattgtgctttgaaatatgatttcactatgaaaactcatgtttagatcattttggttttcaaaaaattattatactgaaattatatatgcacatacgattgtagtttttttaatttttttattattaagaattgaaatcaatcatgttaaaatacgatttcaacatatttttttaattatttcagaaatcatattttaacataccatctcattagaaaaaaactaaaatcatattttaacatataattttaatttttagaaaaaaatattttaaacaaatgaaaagtgaaatcttattttgatatatgattttttattgtgaa

SEQ ID NO: 16140 - DNA, 1088 bp, Glycine max
  Gm_smallRNAprecursor_8973
aggttaaatacacattttatttttatttatactctcacaaaaccatattgatcatttaattttacctgtaccaaaaatgccatttctaccaccaaattgttcaggtatccaagaactaggctagccacccctcttgccacggttgaagatccaacgtcgatatcaatctaataatgcaaacataatttaaatgttagcttataaaacaagagaaatgagctgaaaataataaggaaaattttgtgtgaatcagtaatatgaaaagaaattacacaagcaaaacttacaacaaaatcactagtgaatttggccatgttacctctagatagttcttcccacggatataaagcatttctagcgcttgccccactaaacatgctttctttccaacactttgcttgactatccatgacccctgagggaaacaagtcgcgtggcgaggtcccagggtcagagtgggatctgatgtctgtaatatttcatcttaaatcatttgacattaagtgaagttgtccaacagatatataagctgcactccaagaattgaggcagccgatgtgagacttgggtccttggagtgcatatatctgttgggcaacttcacttaatgccaattgattttaagatgaaatctaacatggtatcagagcggactctgaccctggagctcgccttcgcttccgctgcgacgagcaccaaccatttgtggttcacatactaagtccaataagtgctgggcgtgaaggggggtgtattgagaaataccaaagtctcaaatcggctgcctcaatccttggagtgtagcttatatacctgttgggcaacttcacttaatgctaattgattttaagatgaaatttatcaatacccattttcagaaatcgttagaaaccattcaaaaaaggaaaaaaaaaataagaggctctgcagaatgcaaatgaagagagtcccggaaccttgatggtgatcctctgaccccgaaaaagggaatcagagaatcgaaagttcaacaataactactttctgttgtacttcacatgcgacaacgtgaacttaccatgttgcccttcgcattttgcctccaaaac

SEQ ID NO: 16141 - DNA, 1077 bp, Glycine max
  Gm_smallRNAprecursor_8974
tattctaggtgcttggctgggcacgagcaatgcccaagttctctaatgatcttgtgaagtatgtgcaaacttttctggagaggacttatgaaagatgccggactgcatacatggaggtatttttttccttttttggataaaaaaactttgaatagaatgaaaggaaactgcctgactatgatggatatgcaatcctctcaaggaacataaacaaaaacaaagaatacagccacaaacaacagcattattagaaatataccaaatcctcattgggccagacaaagccatctttttttttttttgatcagcaaagataaattagtatatatatgtaagtaccaggggtactaagaaaacaaagttttgaagttcagcagacatatggtttcctaatacaagccagacaaagccatctgtttgaaacaaccaatgttgttaatggcggatggcggttcatggcggaaagtaaaaaatccgccataaaaatatggcggatggcgtagcggaaaatggcggatgtcatggcggaccaaaaaaaaaaaaacatatatataaactcattgaaattgaaaaaaacaaaggattgcattcaaataaactaaaaaagtttcatgagttcatacaataatcaagtaccaacaccaaataaactcattaaagagttcaaataaactcagccatttaaaagaggactgaacagaaaaaaaaaaaaaaattgtggtgtcaaatacgaaaaaaaaaatgggactgttaaaagtaaaaaggggtgtcaaatagcaaaaggaaaaaaaaagctgtagacagaaaacagggggtgtcaaacagcaaaaataaaactaaaacctacgccttcttcttcttcgcgacgccttcttcttcttcgcgacagcagcttcgtcttctccgcgagaactcctcgctgcaggctgccgttcgtgacagatgcgtcgctgccggagctcgtcgctgccgtttgtgccggtgcgtcgctgccggaggtcgtcgcggctgcgtgcgcatgcggctgcgggtgtcgcggctgggtgcgcgtgtggggtgcgggagggacgcggctgg

SEQ ID NO: 16142 - DNA, 1068 bp, Glycine max
  Gm_smallRNAprecursor_8975
tggaattggaattgaagggtttgggtttttagggttcttatacgatgagtaaaaggaggaagatggttctgatccaaaaaaaaaaacactgggttgtgcatatgatatggtagaacaagcaaaagttaaaggtaaagatgatgatgaagctgaccactttgctttatgcttttttgcctttgaggttatacataaatttccatgggtatagaatatcagataaatgcagatttttatttgccaaaggtcatgtcttttatttaccatactattcggtccatcgtgtttaattttaaggttaaagataggtaaaattgcaaatttggtcccctagtttatctctagtttcggatttggtcccttagtaatttaattcacgaatttggtcatcctattttgtaaaatcgtgcaatgttggtcccccatgccacaattaaacgttgaccgttaacaagtgatgttgactgtcacgtgtcatgttcttatttgattatgattgtcatgtgtcatgttctgattggatgtcaactccatgaaagatgaaatgcattgttgttttcattgaccaatcagaacatgacacatgacagttatcatctaataagaacgtgacacatgacagtcaacatcactttgttaatggtcaacgtccatttgtggtctgggggaccaacattgcactattttataaaataggaggactaaattcgtgaattaaattattgggggaccaaatccaaaaataaacataaactgggggaacaaaaatacaattttaccgctaaagatatggcttgttgctcatgtaagttcaattgttcaaagggaagattgaaccagataagctatataaaagatatggcttgttacgcttgtagctcatgaatgttcaagtgttcaattaatcttatattaggtgtacagtccttaaaaattatgttaagaagaatggaatgaaataaaatgaaatagaaaaaaaatgttcattagtttatatgttatggtgaaaatgaacaaaatcttattgtttgggttataatcttaattttaaaatttagtgtgtaagtg

SEQ ID NO: 16143 - DNA, 1089 bp, Glycine max
  Gm_smallRNAprecursor_8976
tggaattgaagggtttgggtttttagggttcttatacgatgagtaaaaggaggaagatggttctgatccaaaaaaaaaaacactgggttgtgcatatgatatggtagaacaagcaaaagttaaaggtaaagatgatgatgaagctgaccactttgctttatgcttttttgcctttgaggttatacataaatttccatgggtatagaatatcagataaatgcagatttttatttgccaaaggtcatgtcttttatttaccatactattcggtccatcgtgtttaattttaaggttaaagataggtaaaattgcaaatttggtcccctagtttatctctagtttcggatttggtcccttagtaatttaattcacgaatttggtcatcctattttgtaaaatcgtgcaatgttggtcccccatgccacaattaaacgttgaccgttaacaagtgatgttgactgtcacgtgtcatgttcttatttgattatgattgtcatgtgtcatgttctgattggatgtcaactccatgaaagatgaaatgcattgttgttttcattgaccaatcagaacatgacacatgacagttatcatctaataagaacgtgacacatgacagtcaacatcactttgttaatggtcaacgtccatttgtggtctgggggaccaacattgcactattttataaaataggaggactaaattcgtgaattaaattattgggggaccaaatccaaaaataaacataaactgggggaacaaaaatacaattttaccgctaaagatatggcttgttgctcatgtaagttcaattgttcaaagggaagattgaaccagataagctatataaaagatatggcttgttacgcttgtagctcatgaatgttcaagtgttcaattaatcttatattaggtgtacagtccttaaaaattatgttaagaagaatggaatgaaataaaatgaaatagaaaaaaaatgttcattagtttatatgttatggtgaaaatgaacaaaatcttattgtttgggttataatcttaattttaaaatttagtgtgtaagtgctaatatctattggtgggttgtgtgct

SEQ ID NO: 16144 - DNA, 1046 bp, Glycine max
  Gm_smallRNAprecursor_8977
catcaatatgtatattgtaatacactaccccctcccccctcaaaaaaagaaaaatgaaaaaatgtatagactaacaaaaatacaaattaagaaaaaagaaagaaagacagtgatctatcttccacatatgagacaaaagagatgacactggaaacagcaaaactagctacttagaaccagagatggtccaaaatgtagcctaataaaaaaacgtacaaaagagggagacaaaaaactaaaaaggaaccacatacttttaatatgcttttgctagctatacgtttgccatcttcccattgctcttatctgtacgcaatcctcactcaacctcttgaagaagagacgaggaagaacgacacaagatgtgtatatatacacatacatataacctaagaaattaaacatgtatagatgaagattataagctactacggtccgtggagggaaaagggtcatatatttgtatactactctcttcattgtcgtgcacctgcagcagttgaagctgccagcatgatctgagtttaccttctattggtaagaacagatcatgtggctgcttcacctgttgaatggaagcatatagaaaccctaattcgctttctgattctccagaacaacttcatccggtttcatagaaccctagaaaaggttccttcaattcatccttgcatcttgtatttatacagttatacttgtatgtatatgtatatatggatactatttcattgttgcttttcctctcttctacttttcacataaatatatatatatatgcatgttttctggatggctagctgaattgtgtattcttgtgttggctaaatctggagattctatttgaatcagcattcatgttgcttgattcttgtaaaaagaaagaggagaggatggtggcatatgttcatgattccagtgacagtaacgcactaacgcgttccggtggtgcgttctcctaccttggggttggggacacttagtattaattattttcattagtcacctaattaattaaaactgttttttttccatcattttttctgttg

SEQ ID NO: 16145 - DNA, 1046 bp, Glycine max; identical to SEQ ID NO: 16144
  Gm_smallRNAprecursor_8978

SEQ ID NO: 16146 - DNA, 1046 bp, Glycine max; identical to SEQ ID NO: 16144
  Gm_smallRNAprecursor_8979

SEQ ID NO: 16147 - DNA, 1047 bp, Glycine max
  Gm_smallRNAprecursor_8980
catcaatatgtatattgtaatacactaccccctcccccctcaaaaaaagaaaaatgaaaaaatgtatagactaacaaaaatacaaattaagaaaaaagaaagaaagacagtgatctatcttccacatatgagacaaaagagatgacactggaaacagcaaaactagctacttagaaccagagatggtccaaaatgtagcctaataaaaaaacgtacaaaagagggagacaaaaaactaaaaaggaaccacatacttttaatatgcttttgctagctatacgtttgccatcttcccattgctcttatctgtacgcaatcctcactcaacctcttgaagaagagacgaggaagaacgacacaagatgtgtatatatacacatacatataacctaagaaattaaacatgtatagatgaagattataagctactacggtccgtggagggaaaagggtcatatatttgtatactactctcttcattgtcgtgcacctgcagcagttgaagctgccagcatgatctgagtttaccttctattggtaagaacagatcatgtggctgcttcacctgttgaatggaagcatatagaaaccctaattcgctttctgattctccagaacaacttcatccggtttcatagaaccctagaaaaggttccttcaattcatccttgcatcttgtatttatacagttatacttgtatgtatatgtatatatggatactatttcattgttgcttttcctctcttctacttttcacataaatatatatatatatgcatgttttctggatggctagctgaattgtgtattcttgtgttggctaaatctggagattctatttgaatcagcattcatgttgcttgattcttgtaaaaagaaagaggagaggatggtggcatatgttcatgattccagtgacagtaacgcactaacgcgttccggtggtgcgttctcctaccttggggttggggacacttagtattaattattttcattagtcacctaattaattaaaactgttttttttccatcattttttctgttgc

SEQ ID NO: 16148 - DNA, 1047 bp, Glycine max; identical to SEQ ID NO: 16147
  Gm_smallRNAprecursor_8981

SEQ ID NO: 16149 - DNA, 1047 bp, Glycine max; identical to SEQ ID NO: 16147
  Gm_smallRNAprecursor_8982

SEQ ID NO: 16150 - DNA, 1109 bp, Glycine max
  Gm_smallRNAprecursor_8983
tttcctaattatgagatatatcttcttttaccttattttttttgctgttaaaaataaatataagtagttgtgatgttttggtttattattgaatgatttgcaggaccattatcgtgggagaagccctactagggaaagagacagggatagaaggcacgatagtcatagacacaggtactgttctgtctttgcaagtgttttgtaattgtaactttggattgatgtagatgcaaatattgttattgaaaaagctttttctggtaccttcaatttgcattttggtttttcgtcaattttggtagtgtaggagtgtatctggactgtttcccatttctcagtctctattatatccctttgtcagtacagtctactaagggttatagtcttcagtctccaccatcataatacgttgtcgtttaagattttacatcctctaaactggcgtatcatgctgatagcggcaatcaaaaccatcacggcaactctttgaatggttatagtatttgcatggcctactgatcttgttactaggttcctataatatttcacatccttcttcacaacttgtggttgtgaagaagacactaacaaggatggttctagcaagatcagtaagccatgcaaatactataacagttcaaagggttgccacgttggttttgattgttgctatcagcatggtatgccagtctggaggatgtaaaatcttaaacgatgtattctgatggtggagaccaaagactataacccttagtagactgtactgacaaaggggtctaaagcctcaaatcaattgtaattttcttataatgacaagattctaggaagactctgagctttatttacaacagatatgaataaattatgctggaagctgtttttgaatttgcgcaaggttacacttctatttccactctggcattcagagccatctgtggtatacaactgcttcctatagtaagattcaatgatcctgccaggtttctctgcactgacagtgtgcagtgagaagtatgatgggtcaaacagctatgttgcattggtagatggtgctccacaagtattatcttatatattgaagagttcagtttactctttttaatggatca

SEQ ID NO: 16151 - DNA, 1080 bp, Glycine max
  Gm_smallRNAprecursor_8984
caaatgcttaaaagactgcagcatgaaagaacgaaaaaaaaaaacatgaaaatggacgaaaagttctttttaagtgctgaataaatgttcaaaacttgaaggaaatgtttgcagatgaatttattaaataatctctcgtttatgattttttttagcccttcaatcattttcaatgcttaattgagtttttaaacagccccttaatctgatctaacttgagtactacttaaaatatgctaacaaaaatcttaggaagtgcaaggtactaagggatccttcaatccaagtacaacaaagccttatcccacatggatcatgcaacaccattcatcatggttaaaaacctaagtttcaggaatattatttagcctgacatctcctttgacaatttccaccaatgtcctttcggtctctctctccttcaatccaatgttgttaatggcggatggcggttcatggcggaaagtaaaaaatccgccataaaaatatggcggatggcgtagcggaaaatggcggatgtcatggcggacacaaaaaaaaaaaaaaacatatatataaactcattgaaattgaaaaaaacaaaggattgcattcaaataaactaaaaaagtttcatgagttcatacaataatcaagtaccaacaccaaataaactcattaaagagttcaaaaaagttgtagacagaaaaatggggggtgtcaaatagcaaaaggaaaaaaaaagttgtagacagaaaaatggggggtgtcaaatagcaaaaggaaaaaaaaaaagctgtagacagaaaaatggggggtgtcaaacagcaaaaagccccaaaaaaaaaaaagaaacagatcagctgacccgcgtcttcttccttcctcttcttcgtcttcttcaaacgcgagacagaaaaatggggggtgtcgcgcgttgccggggctcgtcgacggaggtcgtcggcgccgttcgtgcgttgcgggcctcgtcgcggcggcggctgggtgcggcggggagggggtggtgtcgcggcggcggctgggagcggcggggttcgggagggacgcaggcaggttcgggagggaatggaagctgtt

SEQ ID NO: 16152 - DNA, 783 bp, Glycine max
  Gm_smallRNAprecursor_8985
ctttctgtaaaatgtctttggctgatttgcagtcaacccttactaaaaatttttgatttaataaatcagattgaaatttggaaatgcataaaacaattgctaaaacttcttttttaacagttgaatactttaattgtgcaggattccaatgttttgaagtatatgcgatgacatgttcttgaccatgtatttgttgtttgaggataccaccgtcaccgatgtctgatgcatcagtttcgacaactttgaatgcctgtggaatgggaagatacagacattttatggattggactttgactttgatttctttaactgtttgggtatggaggtcagaccaaggaggcggatttttctttagcctatcatgcaatggtttgacaatattatttaagtaggggacaaattctcctacgtaatttagacaacctagaaatctttgtaactgggttttgtccaagatttggttgggaaatttgctagcaaactctattgacctttcgattggaatgattgtaccttgataaatattgtgaccaaggaatcgaattcgagtttggaaaagattgatttttgatttggagactgccaaaccattttgtttaatgatatggatgaaggtttggagatgtttgaaatgttggtcaatgttttgggaaaagattaaaacatcatctatgtagacaatgacaaattttgaataaggattaaatatatcattcataattttttgaattctgaagggcattcttcagttcgaatgcatcacatcctgggggcctaact

SEQ ID NO: 16153 - DNA, 1147 bp, Glycine max
  Gm_smallRNAprecursor_8986
gaattcgtgattccttgctattatagagcttgttgaattgttcgaatccctgttggacttcttctggaaatatttgtggaattggtccgaagtagttccaccattggaggaaccaatttggaaaattatatgcagtattatttttgaagtaaatcagccatgaatgcttgaacttactattttgatgccagaacacatttgtccatgcgtcaacgtaatcccaataattataccctgcaggatcaaatggtgcagagaattttttgggttggtttaagtttgagccataatgtcgtggctgcataaccttcaggatttggattgtggaatgggtatttaaatttggatcattggggtctttgaagtgtttaatagatactgagtttgtatctattaggatgaattcgtagaatttgcgggttttgtttgcggctattggcctgtaatggaatccctgggggaatactttggcggttgctttgataggattcttgtcccaatattctggttccatttgtaaaacattgaaaaatttgttttttgaaatgtaactgttaccgggttgtggtattgattcttgttgagtcaacgattggcttggtttttggttatagacggttttggtctgtttggctttttggatttgtttttgcagatctgtttcagaatcatcgtctgattctgaggccatttctgcccaggtctttttggataattttggtattttggtgaggcctatatcctctaaggccaggagagtttgtattgaccaggcatagtcagccacggtctgtttggttgttgttggttttggagattcctgagttgatgactcagatttgacggtagttgtttgggtcaatgacccttcaagttttcctttctgggttgatgacccagtctgggtaggtgacccagaagatgttgtagttgcctttttggttattggctctggtagagccagtagaacttctttacctttcgtactggatcttcctcctctaccggaggaactagacaccttaggaggcatcgggaattttctgtaaaaattcacgggtgaggtagtcaggtagagagttggaagagcccttgatatattcttgtcgcaacctacccttcggcgggagggcgacgcgagactcgc

SEQ ID NO: 16154 - DNA, 1071 bp, Glycine max
  Gm_smallRNAprecursor_8987
ccgtgagtattgcttttgaaatgaggggggaagcagtttttgaatgcaaaaacgttcccctccctcgtttcaatatttttggtgcaggagttgctcgcccaggcgaggtaacctgctgtatatatatatataaagagtttttccctaggcagagcttctctctctaaaacctgattctaagactatctcaaagggtgcctcacaaaggggacgaggactcctttaaatagacccaatttttactgtttctacagtatcggtaatgtttaccagaactgttacaaaaatttttacaaattacattatttaaaagaaactgacaaattagttacaataattcatgattattacaactaattaatcgtcgtccaatgatataccaaaacagtcatcttcattctggtagaatggatcatcgtcttggtcatcattagtctctgatgattcagcaaccttcttggaaggttcttcttccacttcctgttgaagtagttggagaacttctttgagattctgagcaagactttctttagattttgagcttgctaagaatgctgccagttgcgacttctgatttagaaacaaagatgtctccggatcagtaggtttaaggaactcaggattgctctggaaccagttcttgacttaatctggagcagcctttgaagtatcgaattgtgaccaccattttacaaaggcgtgtctctgtaacggtggatattgcttgttgttttcagtttttctgtatctgtattgccatgaaaagatcgatgacaaggcaaaactggaaaaatactttaaatctgccggaattcgtgattccttgctattatagagcttgttgaattgttcgaatccctgttggacttcttctggaaatatttgtggaattggtccgaagtagttccaccattggaggaaccaatttggaaaattatatgcagtattatttttgaagtaaatcagccatgaatgcttgaacttactattttgatgccagaacacatttgtccatgcgtcaacgtaatcccaataattataccctgcaggatcaaatggtgcagagaattt

SEQ ID NO: 16155 - DNA, 1072 bp, Glycine max
  Gm_smallRNAprecursor_8988
ccgtgagtattgcttttgaaatgaggggggaagcagtttttgaatgcaaaaacgttcccctccctcgtttcaatatttttggtgcaggagttgctcgcccaggcgaggtaacctgctgtatatatatatataaagagtttttccctaggcagagcttctctctctaaaacctgattctaagactatctcaaagggtgcctcacaaaggggacgaggactcctttaaatagacccaatttttactgtttctacagtatcggtaatgtttaccagaactgttacaaaaatttttacaaattacattatttaaaagaaactgacaaattagttacaataattcatgattattacaactaattaatcgtcgtccaatgatataccaaaacagtcatcttcattctggtagaatggatcatcgtcttggtcatcattagtctctgatgattcagcaaccttcttggaaggttcttcttccacttcctgttgaagtagttggagaacttctttgagattctgagcaagactttctttagattttgagcttgctaagaatgctgccagttgcgacttctgatttagaaacaaagatgtctccggatcagtaggtttaaggaactcaggattgctctggaaccagttcttgacttaatctggagcagcctttgaagtatcgaattgtgaccaccattttacaaaggcgtgtctctgtaacggtggatattgcttgttgttttcagtttttctgtatctgtattgccatgaaaagatcgatgacaaggcaaaactggaaaaatactttaaatctgccggaattcgtgattccttgctattatagagcttgttgaattgttcgaatccctgttggacttcttctggaaatatttgtggaattggtccgaagtagttccaccattggaggaaccaatttggaaaattatatgcagtattatttttgaagtaaatcagccatgaatgcttgaacttactattttgatgccagaacacatttgtccatgcgtcaacgtaatcccaataattataccctgcaggatcaaatggtgcagagaatttt

SEQ ID NO: 16156 - DNA, 1040 bp, Glycine max
  Gm_smallRNAprecursor_8989
tgagtattgcttttgaaatgaggggggaagcagtttttgaatgcaaaaacgttcccctccctcgtttcaatatttttggtgcaggagttgctcgcccaggcgaggtaacctgctgtatatatatatataaagagtttttccctaggcagagcttctctctctaaaacctgattctaagactatctcaaagggtgcctcacaaaggggacgaggactcctttaaatagacccaatttttactgtttctacagtatcggtaatgtttaccagaactgttacaaaaatttttacaaattacattatttaaaagaaactgacaaattagttacaataattcatgattattacaactaattaatcgtcgtccaatgatataccaaaacagtcatcttcattctggtagaatggatcatcgtcttggtcatcattagtctctgatgattcagcaaccttcttggaaggttcttcttccacttcctgttgaagtagttggagaacttctttgagattctgagcaagactttctttagattttgagcttgctaagaatgctgccagttgcgacttctgatttagaaacaaagatgtctccggatcagtaggtttaaggaactcaggattgctctggaaccagttcttgacttaatctggagcagcctttgaagtatcgaattgtgaccaccattttacaaaggcgtgtctctgtaacggtggatattgcttgttgttttcagtttttctgtatctgtattgccatgaaaagatcgatgacaaggcaaaactggaaaaatactttaaatctgccggaattcgtgattccttgctattatagagcttgttgaattgttcgaatccctgttggacttcttctggaaatatttgtggaattggtccgaagtagttccaccattggaggaaccaatttggaaaattatatgcagtattatttttgaagtaaatcagccatgaatgcttgaacttactattttgatgccagaacacatttgtccatgcgtcaacgtaatcccaataattatacc

SEQ ID NO: 16157 - DNA, 1068 bp, Glycine max
  Gm_smallRNAprecursor_8990
tgagtattgcttttgaaatgaggggggaagcagtttttgaatgcaaaaacgttcccctccctcgtttcaatatttttggtgcaggagttgctcgcccaggcgaggtaacctgctgtatatatatatataaagagtttttccctaggcagagcttctctctctaaaacctgattctaagactatctcaaagggtgcctcacaaaggggacgaggactcctttaaatagacccaatttttactgtttctacagtatcggtaatgtttaccagaactgttacaaaaatttttacaaattacattatttaaaagaaactgacaaattagttacaataattcatgattattacaactaattaatcgtcgtccaatgatataccaaaacagtcatcttcattctggtagaatggatcatcgtcttggtcatcattagtctctgatgattcagcaaccttcttggaaggttcttcttccacttcctgttgaagtagttggagaacttctttgagattctgagcaagactttctttagattttgagcttgctaagaatgctgccagttgcgacttctgatttagaaacaaagatgtctccggatcagtaggtttaaggaactcaggattgctctggaaccagttcttgacttaatctggagcagcctttgaagtatcgaattgtgaccaccattttacaaaggcgtgtctctgtaacggtggatattgcttgttgttttcagtttttctgtatctgtattgccatgaaaagatcgatgacaaggcaaaactggaaaaatactttaaatctgccggaattcgtgattccttgctattatagagcttgttgaattgttcgaatccctgttggacttcttctggaaatatttgtggaattggtccgaagtagttccaccattggaggaaccaatttggaaaattatatgcagtattatttttgaagtaaatcagccatgaatgcttgaacttactattttgatgccagaacacatttgtccatgcgtcaacgtaatcccaataattataccctgcaggatcaaatggtgcagagaattt

SEQ ID NO: 16158 - DNA, 1069 bp, Glycine max
  Gm_smallRNAprecursor_8991
tgagtattgcttttgaaatgaggggggaagcagtttttgaatgcaaaaacgttcccctccctcgtttcaatatttttggtgcaggagttgctcgcccaggcgaggtaacctgctgtatatatatatataaagagtttttccctaggcagagcttctctctctaaaacctgattctaagactatctcaaagggtgcctcacaaaggggacgaggactcctttaaatagacccaatttttactgtttctacagtatcggtaatgtttaccagaactgttacaaaaatttttacaaattacattatttaaaagaaactgacaaattagttacaataattcatgattattacaactaattaatcgtcgtccaatgatataccaaaacagtcatcttcattctggtagaatggatcatcgtcttggtcatcattagtctctgatgattcagcaaccttcttggaaggttcttcttccacttcctgttgaagtagttggagaacttctttgagattctgagcaagactttctttagattttgagcttgctaagaatgctgccagttgcgacttctgatttagaaacaaagatgtctccggatcagtaggtttaaggaactcaggattgctctggaaccagttcttgacttaatctggagcagcctttgaagtatcgaattgtgaccaccattttacaaaggcgtgtctctgtaacggtggatattgcttgttgttttcagtttttctgtatctgtattgccatgaaaagatcgatgacaaggcaaaactggaaaaatactttaaatctgccggaattcgtgattccttgctattatagagcttgttgaattgttcgaatccctgttggacttcttctggaaatatttgtggaattggtccgaagtagttccaccattggaggaaccaatttggaaaattatatgcagtattatttttgaagtaaatcagccatgaatgcttgaacttactattttgatgccagaacacatttgtccatgcgtcaacgtaatcccaataattataccctgcaggatcaaatggtgcagagaatttt

SEQ ID NO: 16159 - DNA, 1048 bp, Glycine max
  Gm_smallRNAprecursor_8992
caatatttttggtgcaggagttgctcgcccaggcgaggtaacctgctgtatatatatatataaagagtttttccctaggcagagcttctctctctaaaacctgattctaagactatctcaaagggtgcctcacaaaggggacgaggactcctttaaatagacccaatttttactgtttctacagtatcggtaatgtttaccagaactgttacaaaaatttttacaaattacattatttaaaagaaactgacaaattagttacaataattcatgattattacaactaattaatcgtcgtccaatgatataccaaaacagtcatcttcattctggtagaatggatcatcgtcttggtcatcattagtctctgatgattcagcaaccttcttggaaggttcttcttccacttcctgttgaagtagttggagaacttctttgagattctgagcaagactttctttagattttgagcttgctaagaatgctgccagttgcgacttctgatttagaaacaaagatgtctccggatcagtaggtttaaggaactcaggattgctctggaaccagttcttgacttaatctggagcagcctttgaagtatcgaattgtgaccaccattttacaaaggcgtgtctctgtaacggtggatattgcttgttgttttcagtttttctgtatctgtattgccatgaaaagatcgatgacaaggcaaaactggaaaaatactttaaatctgccggaattcgtgattccttgctattatagagcttgttgaattgttcgaatccctgttggacttcttctggaaatatttgtggaattggtccgaagtagttccaccattggaggaaccaatttggaaaattatatgcagtattatttttgaagtaaatcagccatgaatgcttgaacttactattttgatgccagaacacatttgtccatgcgtcaacgtaatcccaataattataccctgcaggatcaaatggtgcagagaattttttgggttggtttaagtttgagccataatgtcgtggctgcataacct

SEQ ID NO: 16160 - DNA, 1047 bp, Glycine max
  Gm_smallRNAprecursor_8993
aatatttttggtgcaggagttgctcgcccaggcgaggtaacctgctgtatatatatatataaagagtttttccctaggcagagcttctctctctaaaacctgattctaagactatctcaaagggtgcctcacaaaggggacgaggactcctttaaatagacccaatttttactgtttctacagtatcggtaatgtttaccagaactgttacaaaaatttttacaaattacattatttaaaagaaactgacaaattagttacaataattcatgattattacaactaattaatcgtcgtccaatgatataccaaaacagtcatcttcattctggtagaatggatcatcgtcttggtcatcattagtctctgatgattcagcaaccttcttggaaggttcttcttccacttcctgttgaagtagttggagaacttctttgagattctgagcaagactttctttagattttgagcttgctaagaatgctgccagttgcgacttctgatttagaaacaaagatgtctccggatcagtaggtttaaggaactcaggattgctctggaaccagttcttgacttaatctggagcagcctttgaagtatcgaattgtgaccaccattttacaaaggcgtgtctctgtaacggtggatattgcttgttgttttcagtttttctgtatctgtattgccatgaaaagatcgatgacaaggcaaaactggaaaaatactttaaatctgccggaattcgtgattccttgctattatagagcttgttgaattgttcgaatccctgttggacttcttctggaaatatttgtggaattggtccgaagtagttccaccattggaggaaccaatttggaaaattatatgcagtattatttttgaagtaaatcagccatgaatgcttgaacttactattttgatgccagaacacatttgtccatgcgtcaacgtaatcccaataattataccctgcaggatcaaatggtgcagagaattttttgggttggtttaagtttgagccataatgtcgtggctgcataacct

SEQ ID NO: 16161 - DNA, 1198 bp, Glycine max
  Gm_smallRNAprecursor_8994
tatatatatatataaagagtttttccctaggcagagcttctctctctaaaacctgattctaagactatctcaaagggtgcctcacaaaggggacgaggactcctttaaatagacccaatttttactgtttctacagtatcggtaatgtttaccagaactgttacaaaaatttttacaaattacattatttaaaagaaactgacaaattagttacaataattcatgattattacaactaattaatcgtcgtccaatgatataccaaaacagtcatcttcattctggtagaatggatcatcgtcttggtcatcattagtctctgatgattcagcaaccttcttggaaggttcttcttccacttcctgttgaagtagttggagaacttctttgagattctgagcaagactttctttagattttgagcttgctaagaatgctgccagttgcgacttctgatttagaaacaaagatgtctccggatcagtaggtttaaggaactcaggattgctctggaaccagttcttgacttaatctggagcagcctttgaagtatcgaattgtgaccaccattttacaaaggcgtgtctctgtaacggtggatattgcttgttgttttcagtttttctgtatctgtattgccatgaaaagatcgatgacaaggcaaaactggaaaaatactttaaatctgccggaattcgtgattccttgctattatagagcttgttgaattgttcgaatccctgttggacttcttctggaaatatttgtggaattggtccgaagtagttccaccattggaggaaccaatttggaaaattatatgcagtattatttttgaagtaaatcagccatgaatgcttgaacttactattttgatgccagaacacatttgtccatgcgtcaacgtaatcccaataattataccctgcaggatcaaatggtgcagagaattttttgggttggtttaagtttgagccataatgtcgtggctgcataaccttcaggatttggattgtggaatgggtatttaaatttggatcattggggtctttgaagtgtttaatagatactgagtttgtatctattaggatgaattcgtagaatttgcgggttttgtttgcggctattggcctgtaatggaatccctgggggaatactttggcggttgctttgataggattcttgtcccaatattctg

SEQ ID NO: 16162 - DNA, 1084 bp, Glycine max
  Gm_smallRNAprecursor_8995
tatggccaagttagaggtttcatatatgtccaccaaagatcgtactcgtcttggagtagactctggtgatgatagttcttgatcttgttattgtggtgaaggtgaaggtggttcaccaaggtcttcttcctcagcttcttcttgaggtagttgagcgggtataagaacgttcttcttcactttttcttcatcccaattccaagaagcatactcatcaacttcaacatcacgaatgatgacgagtttcttagtttgcaagttgtagacacggtagcccttagagatattgctatacccaaggaagatacctcgtatagtcttgtcttcaagcttgtgcctcttcacgtctagaatatagtatatagatccaaagacccttaggtgctttgctgatggcttcttcccgttccaagcttcaattggagtcttgccttttacagacttagttggacatctgttgagtatgtaaacagcagtgtagactgcttcagcccagaatgtgttaggtagtcccttctccttgagcatcgatcttgccatctccataactatgcgattctttctctcggacactccattttgttgaggagaatatgcgactgtaagttgtctcggacactccattttgttgaggacagtccaccctttgccgcgatcacttcttagtacttgtatccgttttccactttgattttcagcaagggccttgaactttttgaatactccaaagacttctgatttttcttttagaaaatatacccatgtcattctagagaagtcatcaatgaagagtatgaagtacatgttgttcccatgtgatggcgtcctcattggtctacagacgtctgtatgtatcagctccaatagatctttctctctccatgctccgcttgttgagaaaggaaatcggtgttgcttaccaaggagacaaccttcacacacttcattgttctcctttatgcttggaagatctctcatcatgtacttctcatgtaacaacttcaaggcatgtgtgttgaagtggccaaatcttcgatgccatagccatgaatcatcaacttgtaccttcatggcaatgtttgtt

SEQ ID NO: 16163 - DNA, 1141 bp, Glycine max
  Gm_smallRNAprecursor_8996
atatgtatatatatatatatatatatatatatatatatatatacatatatatatatatatccagaggtcagtggagtaggatcaaacggacagataggaagtaagaatgcagtatgattaatgaaatgaaaatataaacttgaaaacagatatcaaggtcacaccggagaccggcttacaaaacccaggtgtaagaatgcagtatgattaatgaaacaagatatcaaggtcacaccggagaccggcttacaaaacccaggttttcataaacaaagaaaccgaagcggcggcagagccgcacaggatcggtgaagggagaagagagaaagatgaaaaatagaaatttattgaatctagaaagaagcgcttacaaaaatcttgtttcagagcacctctcttccgaaacctgaaaaaatggctaaatgaaagggtgcctcacaacatacttgaggactccttatatagccaaaaatctaagaccggtagttgccggtagttttgaccgggactatttgactgtttgttacaagacaagtagttttgaccgggactttaatggctacaggacaggtagtattgtccatcattaattacacattaattacaaacaaacggttttctgaccgaaattaaatttaatctaaacagataccaaaacaatcatcttcgttttggtaaaagggatcttcttcgtcttctttggcagaacttgtttcttccttctttgaggatgaaacttcttcttcttgttgtaacatttgtagaacttccttcagatttttagctaagacctcctttgatgtcgatcctgctaaaaatgctgccagatgagacttttggttcaaaaacacagaagtctctggatcagctgccttgaggaattctggatgggattggaaccatagttttacttgttctggatccgctttggatgagtcaaattgtgtccaccattttacaaatgcgtgtctttgtagtgatggatattggtttgtcttttcagtcttgctgtaacgatattgccatgagaatatccatgacagtgcaaagcttgaaaagtatttaagatctgctggaattcgtgattcctgcgaattgtattgtttcttaaattgggaaaatccttgttggaccgtttctg

SEQ ID NO: 16164 - DNA, 1154 bp, Glycine max
  Gm_smallRNAprecursor_8997
atatgtatatatatatatatatatatatatatatatatatatacatatatatatatatatccagaggtcagtggagtaggatcaaacggacagataggaagtaagaatgcagtatgattaatgaaatgaaaatataaacttgaaaacagatatcaaggtcacaccggagaccggcttacaaaacccaggtgtaagaatgcagtatgattaatgaaacaagatatcaaggtcacaccggagaccggcttacaaaacccaggttttcataaacaaagaaaccgaagcggcggcagagccgcacaggatcggtgaagggagaagagagaaagatgaaaaatagaaatttattgaatctagaaagaagcgcttacaaaaatcttgtttcagagcacctctcttccgaaacctgaaaaaatggctaaatgaaagggtgcctcacaacatacttgaggactccttatatagccaaaaatctaagaccggtagttgccggtagttttgaccgggactatttgactgtttgttacaagacaagtagttttgaccgggactttaatggctacaggacaggtagtattgtccatcattaattacacattaattacaaacaaacggttttctgaccgaaattaaatttaatctaaacagataccaaaacaatcatcttcgttttggtaaaagggatcttcttcgtcttctttggcagaacttgtttcttccttctttgaggatgaaacttcttcttcttgttgtaacatttgtagaacttccttcagatttttagctaagacctcctttgatgtcgatcctgctaaaaatgctgccagatgagacttttggttcaaaaacacagaagtctctggatcagctgccttgaggaattctggatgggattggaaccatagttttacttgttctggatccgctttggatgagtcaaattgtgtccaccattttacaaatgcgtgtctttgtagtgatggatattggtttgtcttttcagtcttgctgtaacgatattgccatgagaatatccatgacagtgcaaagcttgaaaagtatttaagatctgctggaattcgtgattcctgcgaattgtattgtttcttaaattgggaaaatccttgttggaccgtttctgggaatatctctgg

SEQ ID NO: 16165 - DNA, 1063 bp, Glycine max
  Gm_smallRNAprecursor_8998
tgaaaacagatatcaaggtcacaccggagaccggcttacaaaacccaggtgtaagaatgcagtatgattaatgaaacaagatatcaaggtcacaccggagaccggcttacaaaacccaggttttcataaacaaagaaaccgaagcggcggcagagccgcacaggatcggtgaagggagaagagagaaagatgaaaaatagaaatttattgaatctagaaagaagcgcttacaaaaatcttgtttcagagcacctctcttccgaaacctgaaaaaatggctaaatgaaagggtgcctcacaacatacttgaggactccttatatagccaaaaatctaagaccggtagttgccggtagttttgaccgggactatttgactgtttgttacaagacaagtagttttgaccgggactttaatggctacaggacaggtagtattgtccatcattaattacacattaattacaaacaaacggttttctgaccgaaattaaatttaatctaaacagataccaaaacaatcatcttcgttttggtaaaagggatcttcttcgtcttctttggcagaacttgtttcttccttctttgaggatgaaacttcttcttcttgttgtaacatttgtagaacttccttcagatttttagctaagacctcctttgatgtcgatcctgctaaaaatgctgccagatgagacttttggttcaaaaacacagaagtctctggatcagctgccttgaggaattctggatgggattggaaccatagttttacttgttctggatccgctttggatgagtcaaattgtgtccaccattttacaaatgcgtgtctttgtagtgatggatattggtttgtcttttcagtcttgctgtaacgatattgccatgagaatatccatgacagtgcaaagcttgaaaagtatttaagatctgctggaattcgtgattcctgcgaattgtattgtttcttaaattgggaaaatccttgttggaccgtttctgggaatatctctgggattggtccaaagaagtcccaccattgcaaaaaccaattgagaaaattg

SEQ ID NO: 16166 - DNA, 1063 bp, Glycine max; identical to SEQ ID NO: 16165
  Gm_smallRNAprecursor_8999

SEQ ID NO: 16167 - DNA, 1064 bp, Glycine max
  Gm_smallRNAprecursor_9000
tgaaaacagatatcaaggtcacaccggagaccggcttacaaaacccaggtgtaagaatgcagtatgattaatgaaacaagatatcaaggtcacaccggagaccggcttacaaaacccaggttttcataaacaaagaaaccgaagcggcggcagagccgcacaggatcggtgaagggagaagagagaaagatgaaaaatagaaatttattgaatctagaaagaagcgcttacaaaaatcttgtttcagagcacctctcttccgaaacctgaaaaaatggctaaatgaaagggtgcctcacaacatacttgaggactccttatatagccaaaaatctaagaccggtagttgccggtagttttgaccgggactatttgactgtttgttacaagacaagtagttttgaccgggactttaatggctacaggacaggtagtattgtccatcattaattacacattaattacaaacaaacggttttctgaccgaaattaaatttaatctaaacagataccaaaacaatcatcttcgttttggtaaaagggatcttcttcgtcttctttggcagaacttgtttcttccttctttgaggatgaaacttcttcttcttgttgtaacatttgtagaacttccttcagatttttagctaagacctcctttgatgtcgatcctgctaaaaatgctgccagatgagacttttggttcaaaaacacagaagtctctggatcagctgccttgaggaattctggatgggattggaaccatagttttacttgttctggatccgctttggatgagtcaaattgtgtccaccattttacaaatgcgtgtctttgtagtgatggatattggtttgtcttttcagtcttgctgtaacgatattgccatgagaatatccatgacagtgcaaagcttgaaaagtatttaagatctgctggaattcgtgattcctgcgaattgtattgtttcttaaattgggaaaatccttgttggaccgtttctgggaatatctctgggattggtccaaagaagtcccaccattgcaaaaaccaattgagaaaattgt

SEQ ID NO: 16168 - DNA, 1209 bp, Glycine max
  Gm_smallRNAprecursor_9001
tgaaaacagatatcaaggtcacaccggagaccggcttacaaaacccaggtgtaagaatgcagtatgattaatgaaacaagatatcaaggtcacaccggagaccggcttacaaaacccaggttttcataaacaaagaaaccgaagcggcggcagagccgcacaggatcggtgaagggagaagagagaaagatgaaaaatagaaatttattgaatctagaaagaagcgcttacaaaaatcttgtttcagagcacctctcttccgaaacctgaaaaaatggctaaatgaaagggtgcctcacaacatacttgaggactccttatatagccaaaaatctaagaccggtagttgccggtagttttgaccgggactatttgactgtttgttacaagacaagtagttttgaccgggactttaatggctacaggacaggtagtattgtccatcattaattacacattaattacaaacaaacggttttctgaccgaaattaaatttaatctaaacagataccaaaacaatcatcttcgttttggtaaaagggatcttcttcgtcttctttggcagaacttgtttcttccttctttgaggatgaaacttcttcttcttgttgtaacatttgtagaacttccttcagatttttagctaagacctcctttgatgtcgatcctgctaaaaatgctgccagatgagacttttggttcaaaaacacagaagtctctggatcagctgccttgaggaattctggatgggattggaaccatagttttacttgttctggatccgctttggatgagtcaaattgtgtccaccattttacaaatgcgtgtctttgtagtgatggatattggtttgtcttttcagtcttgctgtaacgatattgccatgagaatatccatgacagtgcaaagcttgaaaagtatttaagatctgctggaattcgtgattcctgcgaattgtattgtttcttaaattgggaaaatccttgttggaccgtttctgggaatatctctgggattggtccaaagaagtcccaccattgcaaaaaccaattgagaaaattgtaaattgtgttggtcttgaaatatatcagccatgaatgcttgaagcgggtattttggtgccaaaacaccttagtccaagcatcaacgtaatcccaataggtataacctaccggatcaaatggaactgaaaatctctttcctttgtt

SEQ ID NO: 16169 - DNA, 1059 bp, Glycine max
  Gm_smallRNAprecursor_9002
aacagatatcaaggtcacaccggagaccggcttacaaaacccaggtgtaagaatgcagtatgattaatgaaacaagatatcaaggtcacaccggagaccggcttacaaaacccaggttttcataaacaaagaaaccgaagcggcggcagagccgcacaggatcggtgaagggagaagagagaaagatgaaaaatagaaatttattgaatctagaaagaagcgcttacaaaaatcttgtttcagagcacctctcttccgaaacctgaaaaaatggctaaatgaaagggtgcctcacaacatacttgaggactccttatatagccaaaaatctaagaccggtagttgccggtagttttgaccgggactatttgactgtttgttacaagacaagtagttttgaccgggactttaatggctacaggacaggtagtattgtccatcattaattacacattaattacaaacaaacggttttctgaccgaaattaaatttaatctaaacagataccaaaacaatcatcttcgttttggtaaaagggatcttcttcgtcttctttggcagaacttgtttcttccttctttgaggatgaaacttcttcttcttgttgtaacatttgtagaacttccttcagatttttagctaagacctcctttgatgtcgatcctgctaaaaatgctgccagatgagacttttggttcaaaaacacagaagtctctggatcagctgccttgaggaattctggatgggattggaaccatagttttacttgttctggatccgctttggatgagtcaaattgtgtccaccattttacaaatgcgtgtctttgtagtgatggatattggtttgtcttttcagtcttgctgtaacgatattgccatgagaatatccatgacagtgcaaagcttgaaaagtatttaagatctgctggaattcgtgattcctgcgaattgtattgtttcttaaattgggaaaatccttgttggaccgtttctgggaatatctctgggattggtccaaagaagtcccaccattgcaaaaaccaattgagaaaattg

SEQ ID NO: 16170 - DNA, 1059 bp, Glycine max; identical to SEQ ID NO: 16169
  Gm_smallRNAprecursor_9003

SEQ ID NO: 16171 - DNA, 1058 bp, Glycine max
  Gm_smallRNAprecursor_9004
acagatatcaaggtcacaccggagaccggcttacaaaacccaggtgtaagaatgcagtatgattaatgaaacaagatatcaaggtcacaccggagaccggcttacaaaacccaggttttcataaacaaagaaaccgaagcggcggcagagccgcacaggatcggtgaagggagaagagagaaagatgaaaaatagaaatttattgaatctagaaagaagcgcttacaaaaatcttgtttcagagcacctctcttccgaaacctgaaaaaatggctaaatgaaagggtgcctcacaacatacttgaggactccttatatagccaaaaatctaagaccggtagttgccggtagttttgaccgggactatttgactgtttgttacaagacaagtagttttgaccgggactttaatggctacaggacaggtagtattgtccatcattaattacacattaattacaaacaaacggttttctgaccgaaattaaatttaatctaaacagataccaaaacaatcatcttcgttttggtaaaagggatcttcttcgtcttctttggcagaacttgtttcttccttctttgaggatgaaacttcttcttcttgttgtaacatttgtagaacttccttcagatttttagctaagacctcctttgatgtcgatcctgctaaaaatgctgccagatgagacttttggttcaaaaacacagaagtctctggatcagctgccttgaggaattctggatgggattggaaccatagttttacttgttctggatccgctttggatgagtcaaattgtgtccaccattttacaaatgcgtgtctttgtagtgatggatattggtttgtcttttcagtcttgctgtaacgatattgccatgagaatatccatgacagtgcaaagcttgaaaagtatttaagatctgctggaattcgtgattcctgcgaattgtattgtttcttaaattgggaaaatccttgttggaccgtttctgggaatatctctgggattggtccaaagaagtcccaccattgcaaaaaccaattgagaaaattg

SEQ ID NO: 16172 - DNA, 1058 bp, Glycine max; identical to SEQ ID NO: 16171
  Gm_smallRNAprecursor_9005

SEQ ID NO: 16173 - DNA, 1188 bp, Glycine max
  Gm_smallRNAprecursor_9006
caaggtcacaccggagaccggcttacaaaacccaggtgtaagaatgcagtatgattaatgaaacaagatatcaaggtcacaccggagaccggcttacaaaacccaggttttcataaacaaagaaaccgaagcggcggcagagccgcacaggatcggtgaagggagaagagagaaagatgaaaaatagaaatttattgaatctagaaagaagcgcttacaaaaatcttgtttcagagcacctctcttccgaaacctgaaaaaatggctaaatgaaagggtgcctcacaacatacttgaggactccttatatagccaaaaatctaagaccggtagttgccggtagttttgaccgggactatttgactgtttgttacaagacaagtagttttgaccgggactttaatggctacaggacaggtagtattgtccatcattaattacacattaattacaaacaaacggttttctgaccgaaattaaatttaatctaaacagataccaaaacaatcatcttcgttttggtaaaagggatcttcttcgtcttctttggcagaacttgtttcttccttctttgaggatgaaacttcttcttcttgttgtaacatttgtagaacttccttcagatttttagctaagacctcctttgatgtcgatcctgctaaaaatgctgccagatgagacttttggttcaaaaacacagaagtctctggatcagctgccttgaggaattctggatgggattggaaccatagttttacttgttctggatccgctttggatgagtcaaattgtgtccaccattttacaaatgcgtgtctttgtagtgatggatattggtttgtcttttcagtcttgctgtaacgatattgccatgagaatatccatgacagtgcaaagcttgaaaagtatttaagatctgctggaattcgtgattcctgcgaattgtattgtttcttaaattgggaaaatccttgttggaccgtttctgggaatatctctgggattggtccaaagaagtcccaccattgcaaaaaccaattgagaaaattgtaaattgtgttggtcttgaaatatatcagccatgaatgcttgaagcgggtattttggtgccaaaacaccttagtccaagcatcaacgtaatcccaataggtataacctaccggatcaaatggaactgaaaatctcttt

SEQ ID NO: 16174 - DNA, 1032 bp, Glycine max
  Gm_smallRNAprecursor_9007
gaagagagaaagatgaaaaatagaaatttattgaatctagaaagaagcgcttacaaaaatcttgtttcagagcacctctcttccgaaacctgaaaaaatggctaaatgaaagggtgcctcacaacatacttgaggactccttatatagccaaaaatctaagaccggtagttgccggtagttttgaccgggactatttgactgtttgttacaagacaagtagttttgaccgggactttaatggctacaggacaggtagtattgtccatcattaattacacattaattacaaacaaacggttttctgaccgaaattaaatttaatctaaacagataccaaaacaatcatcttcgttttggtaaaagggatcttcttcgtcttctttggcagaacttgtttcttccttctttgaggatgaaacttcttcttcttgttgtaacatttgtagaacttccttcagatttttagctaagacctcctttgatgtcgatcctgctaaaaatgctgccagatgagacttttggttcaaaaacacagaagtctctggatcagctgccttgaggaattctggatgggattggaaccatagttttacttgttctggatccgctttggatgagtcaaattgtgtccaccattttacaaatgcgtgtctttgtagtgatggatattggtttgtcttttcagtcttgctgtaacgatattgccatgagaatatccatgacagtgcaaagcttgaaaagtatttaagatctgctggaattcgtgattcctgcgaattgtattgtttcttaaattgggaaaatccttgttggaccgtttctgggaatatctctgggattggtccaaagaagtcccaccattgcaaaaaccaattgagaaaattgtaaattgtgttggtcttgaaatatatcagccatgaatgcttgaagcgggtattttggtgccaaaacaccttagtccaagcatcaacgtaatcccaataggtataacctaccggatcaaatggaactgaaaatctctttcctttgtt

SEQ ID NO: 16175 - DNA, 1058 bp, Glycine max
  Gm_smallRNAprecursor_9008
aaatttattgaatctagaaagaagcgcttacaaaaatcttgtttcagagcacctctcttccgaaacctgaaaaaatggctaaatgaaagggtgcctcacaacatacttgaggactccttatatagccaaaaatctaagaccggtagttgccggtagttttgaccgggactatttgactgtttgttacaagacaagtagttttgaccgggactttaatggctacaggacaggtagtattgtccatcattaattacacattaattacaaacaaacggttttctgaccgaaattaaatttaatctaaacagataccaaaacaatcatcttcgttttggtaaaagggatcttcttcgtcttctttggcagaacttgtttcttccttctttgaggatgaaacttcttcttcttgttgtaacatttgtagaacttccttcagatttttagctaagacctcctttgatgtcgatcctgctaaaaatgctgccagatgagacttttggttcaaaaacacagaagtctctggatcagctgccttgaggaattctggatgggattggaaccatagttttacttgttctggatccgctttggatgagtcaaattgtgtccaccattttacaaatgcgtgtctttgtagtgatggatattggtttgtcttttcagtcttgctgtaacgatattgccatgagaatatccatgacagtgcaaagcttgaaaagtatttaagatctgctggaattcgtgattcctgcgaattgtattgtttcttaaattgggaaaatccttgttggaccgtttctgggaatatctctgggattggtccaaagaagtcccaccattgcaaaaaccaattgagaaaattgtaaattgtgttggtcttgaaatatatcagccatgaatgcttgaagcgggtattttggtgccaaaacaccttagtccaagcatcaacgtaatcccaataggtataacctaccggatcaaatggaactgaaaatctctttcctttgttcaagtccgaaccaaagtgtctcggttgaagaacttttagtatttggatg

SEQ ID NO: 16176 - DNA, 1131 bp, Glycine max
  Gm_smallRNAprecursor_9009
acaagtagttttgaccgggactttaatggctacaggacaggtagtattgtccatcattaattacacattaattacaaacaaacggttttctgaccgaaattaaatttaatctaaacagataccaaaacaatcatcttcgttttggtaaaagggatcttcttcgtcttctttggcagaacttgtttcttccttctttgaggatgaaacttcttcttcttgttgtaacatttgtagaacttccttcagatttttagctaagacctcctttgatgtcgatcctgctaaaaatgctgccagatgagacttttggttcaaaaacacagaagtctctggatcagctgccttgaggaattctggatgggattggaaccatagttttacttgttctggatccgctttggatgagtcaaattgtgtccaccattttacaaatgcgtgtctttgtagtgatggatattggtttgtcttttcagtcttgctgtaacgatattgccatgagaatatccatgacagtgcaaagcttgaaaagtatttaagatctgctggaattcgtgattcctgcgaattgtattgtttcttaaattgggaaaatccttgttggaccgtttctgggaatatctctgggattggtccaaagaagtcccaccattgcaaaaaccaattgagaaaattgtaaattgtgttggtcttgaaatatatcagccatgaatgcttgaagcgggtattttggtgccaaaacaccttagtccaagcatcaacgtaatcccaataggtataacctaccggatcaaatggaactgaaaatctctttcctttgttcaagtccgaaccaaagtgtctcggttgaagaacttttagtatttggatggttgagtgggtgtttaaggtttggtcttttggatctttgaagtgtttgatagatactgagtttgaatctaccaaaatcaattcataaaaagttcttgtcttcaggatggtggttggtttgtagtgaaatcctggtgggaaagccttggctgtcgccttgaagggatttttgtcccaaaattcaggttccatctgcaaaacagttaacaatttatttttataaatataattgttagtttgtttggtaggtggtgtttgagcttt

SEQ ID NO: 16177 - DNA, 1146 bp, Glycine max
  Gm_smallRNAprecursor_9010
gctacaggacaggtagtattgtccatcattaattacacattaattacaaacaaacggttttctgaccgaaattaaatttaatctaaacagataccaaaacaatcatcttcgttttggtaaaagggatcttcttcgtcttctttggcagaacttgtttcttccttctttgaggatgaaacttcttcttcttgttgtaacatttgtagaacttccttcagatttttagctaagacctcctttgatgtcgatcctgctaaaaatgctgccagatgagacttttggttcaaaaacacagaagtctctggatcagctgccttgaggaattctggatgggattggaaccatagttttacttgttctggatccgctttggatgagtcaaattgtgtccaccattttacaaatgcgtgtctttgtagtgatggatattggtttgtcttttcagtcttgctgtaacgatattgccatgagaatatccatgacagtgcaaagcttgaaaagtatttaagatctgctggaattcgtgattcctgcgaattgtattgtttcttaaattgggaaaatccttgttggaccgtttctgggaatatctctgggattggtccaaagaagtcccaccattgcaaaaaccaattgagaaaattgtaaattgtgttggtcttgaaatatatcagccatgaatgcttgaagcgggtattttggtgccaaaacaccttagtccaagcatcaacgtaatcccaataggtataacctaccggatcaaatggaactgaaaatctctttcctttgttcaagtccgaaccaaagtgtctcggttgaagaacttttagtatttggatggttgagtgggtgtttaaggtttggtcttttggatctttgaagtgtttgatagatactgagtttgaatctaccaaaatcaattcataaaaagttcttgtcttcaggatggtggttggtttgtagtgaaatcctggtgggaaagccttggctgtcgccttgaagggatttttgtcccaaaattcaggttccatctgcaaaacagttaacaatttatttttataaatataattgttagtttgtttggtaggtggtgtttgagctttggctaaaggtagttttcctttagtattggtggctgttttggtc

SEQ ID NO: 16178 - DNA, 1080 bp, Glycine max
  Gm_smallRNAprecursor_9011
tttggcagaacttgtttcttccttctttgaggatgaaacttcttcttcttgttgtaacatttgtagaacttccttcagatttttagctaagacctcctttgatgtcgatcctgctaaaaatgctgccagatgagacttttggttcaaaaacacagaagtctctggatcagctgccttgaggaattctggatgggattggaaccatagttttacttgttctggatccgctttggatgagtcaaattgtgtccaccattttacaaatgcgtgtctttgtagtgatggatattggtttgtcttttcagtcttgctgtaacgatattgccatgagaatatccatgacagtgcaaagcttgaaaagtatttaagatctgctggaattcgtgattcctgcgaattgtattgtttcttaaattgggaaaatccttgttggaccgtttctgggaatatctctgggattggtccaaagaagtcccaccattgcaaaaaccaattgagaaaattgtaaattgtgttggtcttgaaatatatcagccatgaatgcttgaagcgggtattttggtgccaaaacaccttagtccaagcatcaacgtaatcccaataggtataacctaccggatcaaatggaactgaaaatctctttcctttgttcaagtccgaaccaaagtgtctcggttgaagaacttttagtatttggatggttgagtgggtgtttaaggtttggtcttttggatctttgaagtgtttgatagatactgagtttgaatctaccaaaatcaattcataaaaagttcttgtcttcaggatggtggttggtttgtagtgaaatcctggtgggaaagccttggctgtcgccttgaagggatttttgtcccaaaattcaggttccatctgcaaaacagttaacaatttatttttataaatataattgttagtttgtttggtaggtggtgtttgagctttggctaaaggtagttttcctttagtattggtggctgttttggtcattgacgcattttggatcattgtttgtaaatttgattcagattcatcatcagattctgaggcaatgtctgccca

SEQ ID NO: 16179 - DNA, 1104 bp, Glycine max
  Gm_smallRNAprecursor_9012
tttggcagaacttgtttcttccttctttgaggatgaaacttcttcttcttgttgtaacatttgtagaacttccttcagatttttagctaagacctcctttgatgtcgatcctgctaaaaatgctgccagatgagacttttggttcaaaaacacagaagtctctggatcagctgccttgaggaattctggatgggattggaaccatagttttacttgttctggatccgctttggatgagtcaaattgtgtccaccattttacaaatgcgtgtctttgtagtgatggatattggtttgtcttttcagtcttgctgtaacgatattgccatgagaatatccatgacagtgcaaagcttgaaaagtatttaagatctgctggaattcgtgattcctgcgaattgtattgtttcttaaattgggaaaatccttgttggaccgtttctgggaatatctctgggattggtccaaagaagtcccaccattgcaaaaaccaattgagaaaattgtaaattgtgttggtcttgaaatatatcagccatgaatgcttgaagcgggtattttggtgccaaaacaccttagtccaagcatcaacgtaatcccaataggtataacctaccggatcaaatggaactgaaaatctctttcctttgttcaagtccgaaccaaagtgtctcggttgaagaacttttagtatttggatggttgagtgggtgtttaaggtttggtcttttggatctttgaagtgtttgatagatactgagtttgaatctaccaaaatcaattcataaaaagttcttgtcttcaggatggtggttggtttgtagtgaaatcctggtgggaaagccttggctgtcgccttgaagggatttttgtcccaaaattcaggttccatctgcaaaacagttaacaatttatttttataaatataattgttagtttgtttggtaggtggtgtttgagctttggctaaaggtagttttcctttagtattggtggctgttttggtcattgacgcattttggatcattgtttgtaaatttgattcagattcatcatcagattctgaggcaatgtctgcccaagattttttgattatttttggaaa

SEQ ID NO: 16180 - DNA, 1134 bp, Glycine max
  Gm_smallRNAprecursor_9013
acttccttcagatttttagctaagacctcctttgatgtcgatcctgctaaaaatgctgccagatgagacttttggttcaaaaacacagaagtctctggatcagctgccttgaggaattctggatgggattggaaccatagttttacttgttctggatccgctttggatgagtcaaattgtgtccaccattttacaaatgcgtgtctttgtagtgatggatattggtttgtcttttcagtcttgctgtaacgatattgccatgagaatatccatgacagtgcaaagcttgaaaagtatttaagatctgctggaattcgtgattcctgcgaattgtattgtttcttaaattgggaaaatccttgttggaccgtttctgggaatatctctgggattggtccaaagaagtcccaccattgcaaaaaccaattgagaaaattgtaaattgtgttggtcttgaaatatatcagccatgaatgcttgaagcgggtattttggtgccaaaacaccttagtccaagcatcaacgtaatcccaataggtataacctaccggatcaaatggaactgaaaatctctttcctttgttcaagtccgaaccaaagtgtctcggttgaagaacttttagtatttggatggttgagtgggtgtttaaggtttggtcttttggatctttgaagtgtttgatagatactgagtttgaatctaccaaaatcaattcataaaaagttcttgtcttcaggatggtggttggtttgtagtgaaatcctggtgggaaagccttggctgtcgccttgaagggatttttgtcccaaaattcaggttccatctgcaaaacagttaacaatttatttttataaatataattgttagtttgtttggtaggtggtgtttgagctttggctaaaggtagttttcctttagtattggtggctgttttggtcattgacgcattttggatcattgtttgtaaatttgattcagattcatcatcagattctgaggcaatgtctgcccaagattttttgattatttttggaaatttggtcagacccatgtcttgaagggcctgaagggtttcaattggccatgcatagtcggccgatgtttgtttggcggttgccggtttgggagattcc

SEQ ID NO: 16181 - DNA, 1140 bp, Glycine max
  Gm_smallRNAprecursor_9014
tttttagctaagacctcctttgatgtcgatcctgctaaaaatgctgccagatgagacttttggttcaaaaacacagaagtctctggatcagctgccttgaggaattctggatgggattggaaccatagttttacttgttctggatccgctttggatgagtcaaattgtgtccaccattttacaaatgcgtgtctttgtagtgatggatattggtttgtcttttcagtcttgctgtaacgatattgccatgagaatatccatgacagtgcaaagcttgaaaagtatttaagatctgctggaattcgtgattcctgcgaattgtattgtttcttaaattgggaaaatccttgttggaccgtttctgggaatatctctgggattggtccaaagaagtcccaccattgcaaaaaccaattgagaaaattgtaaattgtgttggtcttgaaatatatcagccatgaatgcttgaagcgggtattttggtgccaaaacaccttagtccaagcatcaacgtaatcccaataggtataacctaccggatcaaatggaactgaaaatctctttcctttgttcaagtccgaaccaaagtgtctcggttgaagaacttttagtatttggatggttgagtgggtgtttaaggtttggtcttttggatctttgaagtgtttgatagatactgagtttgaatctaccaaaatcaattcataaaaagttcttgtcttcaggatggtggttggtttgtagtgaaatcctggtgggaaagccttggctgtcgccttgaagggatttttgtcccaaaattcaggttccatctgcaaaacagttaacaatttatttttataaatataattgttagtttgtttggtaggtggtgtttgagctttggctaaaggtagttttcctttagtattggtggctgttttggtcattgacgcattttggatcattgtttgtaaatttgattcagattcatcatcagattctgaggcaatgtctgcccaagattttttgattatttttggaaatttggtcagacccatgtcttgaagggcctgaagggtttcaattggccatgcatagtcggccgatgtttgtttggcggttgccggtttgggagattcctgagtggatggctcaggt

SEQ ID NO: 16182 - DNA, 1090 bp, Glycine max
  Gm_smallRNAprecursor_9015
gtcgatcctgctaaaaatgctgccagatgagacttttggttcaaaaacacagaagtctctggatcagctgccttgaggaattctggatgggattggaaccatagttttacttgttctggatccgctttggatgagtcaaattgtgtccaccattttacaaatgcgtgtctttgtagtgatggatattggtttgtcttttcagtcttgctgtaacgatattgccatgagaatatccatgacagtgcaaagcttgaaaagtatttaagatctgctggaattcgtgattcctgcgaattgtattgtttcttaaattgggaaaatccttgttggaccgtttctgggaatatctctgggattggtccaaagaagtcccaccattgcaaaaaccaattgagaaaattgtaaattgtgttggtcttgaaatatatcagccatgaatgcttgaagcgggtattttggtgccaaaacaccttagtccaagcatcaacgtaatcccaataggtataacctaccggatcaaatggaactgaaaatctctttcctttgttcaagtccgaaccaaagtgtctcggttgaagaacttttagtatttggatggttgagtgggtgtttaaggtttggtcttttggatctttgaagtgtttgatagatactgagtttgaatctaccaaaatcaattcataaaaagttcttgtcttcaggatggtggttggtttgtagtgaaatcctggtgggaaagccttggctgtcgccttgaagggatttttgtcccaaaattcaggttccatctgcaaaacagttaacaatttatttttataaatataattgttagtttgtttggtaggtggtgtttgagctttggctaaaggtagttttcctttagtattggtggctgttttggtcattgacgcattttggatcattgtttgtaaatttgattcagattcatcatcagattctgaggcaatgtctgcccaagattttttgattatttttggaaatttggtcagacccatgtcttgaagggcctgaagggtttcaattggccatgcatagtcggccgatgtttgtttggcggttgccggtttgg

SEQ ID NO: 16183 - DNA, 1087 bp, Glycine max
  Gm_smallRNAprecursor_9016
gatcctgctaaaaatgctgccagatgagacttttggttcaaaaacacagaagtctctggatcagctgccttgaggaattctggatgggattggaaccatagttttacttgttctggatccgctttggatgagtcaaattgtgtccaccattttacaaatgcgtgtctttgtagtgatggatattggtttgtcttttcagtcttgctgtaacgatattgccatgagaatatccatgacagtgcaaagcttgaaaagtatttaagatctgctggaattcgtgattcctgcgaattgtattgtttcttaaattgggaaaatccttgttggaccgtttctgggaatatctctgggattggtccaaagaagtcccaccattgcaaaaaccaattgagaaaattgtaaattgtgttggtcttgaaatatatcagccatgaatgcttgaagcgggtattttggtgccaaaacaccttagtccaagcatcaacgtaatcccaataggtataacctaccggatcaaatggaactgaaaatctctttcctttgttcaagtccgaaccaaagtgtctcggttgaagaacttttagtatttggatggttgagtgggtgtttaaggtttggtcttttggatctttgaagtgtttgatagatactgagtttgaatctaccaaaatcaattcataaaaagttcttgtcttcaggatggtggttggtttgtagtgaaatcctggtgggaaagccttggctgtcgccttgaagggatttttgtcccaaaattcaggttccatctgcaaaacagttaacaatttatttttataaatataattgttagtttgtttggtaggtggtgtttgagctttggctaaaggtagttttcctttagtattggtggctgttttggtcattgacgcattttggatcattgtttgtaaatttgattcagattcatcatcagattctgaggcaatgtctgcccaagattttttgattatttttggaaatttggtcagacccatgtcttgaagggcctgaagggtttcaattggccatgcatagtcggccgatgtttgtttggcggttgccggtttgg

SEQ ID NO: 16184 - DNA, 1222 bp, Glycine max
  Gm_smallRNAprecursor_9017
ccttgaggaattctggatgggattggaaccatagttttacttgttctggatccgctttggatgagtcaaattgtgtccaccattttacaaatgcgtgtctttgtagtgatggatattggtttgtcttttcagtcttgctgtaacgatattgccatgagaatatccatgacagtgcaaagcttgaaaagtatttaagatctgctggaattcgtgattcctgcgaattgtattgtttcttaaattgggaaaatccttgttggaccgtttctgggaatatctctgggattggtccaaagaagtcccaccattgcaaaaaccaattgagaaaattgtaaattgtgttggtcttgaaatatatcagccatgaatgcttgaagcgggtattttggtgccaaaacaccttagtccaagcatcaacgtaatcccaataggtataacctaccggatcaaatggaactgaaaatctctttcctttgttcaagtccgaaccaaagtgtctcggttgaagaacttttagtatttggatggttgagtgggtgtttaaggtttggtcttttggatctttgaagtgtttgatagatactgagtttgaatctaccaaaatcaattcataaaaagttcttgtcttcaggatggtggttggtttgtagtgaaatcctggtgggaaagccttggctgtcgccttgaagggatttttgtcccaaaattcaggttccatctgcaaaacagttaacaatttatttttataaatataattgttagtttgtttggtaggtggtgtttgagctttggctaaaggtagttttcctttagtattggtggctgttttggtcattgacgcattttggatcattgtttgtaaatttgattcagattcatcatcagattctgaggcaatgtctgcccaagattttttgattatttttggaaatttggtcagacccatgtcttgaagggcctgaagggtttcaattggccatgcatagtcggccgatgtttgtttggcggttgccggtttgggagattcctgagtggatggctcaggtttgattgaggcaatctgggttgatgacccttctaaattgtttttctgggtagatgacccagcctgggttggtgacccagaagaggtagatgatttcttgatggttggctctggaagagccagcctggctcctttgcctgtactccttcctccccgtagggagattcccgatgcctt

SEQ ID NO: 16185 - DNA, 1193 bp, Glycine max
  Gm_smallRNAprecursor_9018
accatagttttacttgttctggatccgctttggatgagtcaaattgtgtccaccattttacaaatgcgtgtctttgtagtgatggatattggtttgtcttttcagtcttgctgtaacgatattgccatgagaatatccatgacagtgcaaagcttgaaaagtatttaagatctgctggaattcgtgattcctgcgaattgtattgtttcttaaattgggaaaatccttgttggaccgtttctgggaatatctctgggattggtccaaagaagtcccaccattgcaaaaaccaattgagaaaattgtaaattgtgttggtcttgaaatatatcagccatgaatgcttgaagcgggtattttggtgccaaaacaccttagtccaagcatcaacgtaatcccaataggtataacctaccggatcaaatggaactgaaaatctctttcctttgttcaagtccgaaccaaagtgtctcggttgaagaacttttagtatttggatggttgagtgggtgtttaaggtttggtcttttggatctttgaagtgtttgatagatactgagtttgaatctaccaaaatcaattcataaaaagttcttgtcttcaggatggtggttggtttgtagtgaaatcctggtgggaaagccttggctgtcgccttgaagggatttttgtcccaaaattcaggttccatctgcaaaacagttaacaatttatttttataaatataattgttagtttgtttggtaggtggtgtttgagctttggctaaaggtagttttcctttagtattggtggctgttttggtcattgacgcattttggatcattgtttgtaaatttgattcagattcatcatcagattctgaggcaatgtctgcccaagattttttgattatttttggaaatttggtcagacccatgtcttgaagggcctgaagggtttcaattggccatgcatagtcggccgatgtttgtttggcggttgccggtttgggagattcctgagtggatggctcaggtttgattgaggcaatctgggttgatgacccttctaaattgtttttctgggtagatgacccagcctgggttggtgacccagaagaggtagatgatttcttgatggttggctctggaagagccagcctggctcctttgcctgtactccttcctccccgtagggagattcccgatgcc

SEQ ID NO: 16186 - DNA, 1195 bp, Glycine max
  Gm_smallRNAprecursor_9019
accatagttttacttgttctggatccgctttggatgagtcaaattgtgtccaccattttacaaatgcgtgtctttgtagtgatggatattggtttgtcttttcagtcttgctgtaacgatattgccatgagaatatccatgacagtgcaaagcttgaaaagtatttaagatctgctggaattcgtgattcctgcgaattgtattgtttcttaaattgggaaaatccttgttggaccgtttctgggaatatctctgggattggtccaaagaagtcccaccattgcaaaaaccaattgagaaaattgtaaattgtgttggtcttgaaatatatcagccatgaatgcttgaagcgggtattttggtgccaaaacaccttagtccaagcatcaacgtaatcccaataggtataacctaccggatcaaatggaactgaaaatctctttcctttgttcaagtccgaaccaaagtgtctcggttgaagaacttttagtatttggatggttgagtgggtgtttaaggtttggtcttttggatctttgaagtgtttgatagatactgagtttgaatctaccaaaatcaattcataaaaagttcttgtcttcaggatggtggttggtttgtagtgaaatcctggtgggaaagccttggctgtcgccttgaagggatttttgtcccaaaattcaggttccatctgcaaaacagttaacaatttatttttataaatataattgttagtttgtttggtaggtggtgtttgagctttggctaaaggtagttttcctttagtattggtggctgttttggtcattgacgcattttggatcattgtttgtaaatttgattcagattcatcatcagattctgaggcaatgtctgcccaagattttttgattatttttggaaatttggtcagacccatgtcttgaagggcctgaagggtttcaattggccatgcatagtcggccgatgtttgtttggcggttgccggtttgggagattcctgagtggatggctcaggtttgattgaggcaatctgggttgatgacccttctaaattgtttttctgggtagatgacccagcctgggttggtgacccagaagaggtagatgatttcttgatggttggctctggaagagccagcctggctcctttgcctgtactccttcctccccgtagggagattcccgatgcctt

SEQ ID NO: 16187 - DNA, 1058 bp, Glycine max
  Gm_smallRNAprecursor_9020
tacttgttctggatccgctttggatgagtcaaattgtgtccaccattttacaaatgcgtgtctttgtagtgatggatattggtttgtcttttcagtcttgctgtaacgatattgccatgagaatatccatgacagtgcaaagcttgaaaagtatttaagatctgctggaattcgtgattcctgcgaattgtattgtttcttaaattgggaaaatccttgttggaccgtttctgggaatatctctgggattggtccaaagaagtcccaccattgcaaaaaccaattgagaaaattgtaaattgtgttggtcttgaaatatatcagccatgaatgcttgaagcgggtattttggtgccaaaacaccttagtccaagcatcaacgtaatcccaataggtataacctaccggatcaaatggaactgaaaatctctttcctttgttcaagtccgaaccaaagtgtctcggttgaagaacttttagtatttggatggttgagtgggtgtttaaggtttggtcttttggatctttgaagtgtttgatagatactgagtttgaatctaccaaaatcaattcataaaaagttcttgtcttcaggatggtggttggtttgtagtgaaatcctggtgggaaagccttggctgtcgccttgaagggatttttgtcccaaaattcaggttccatctgcaaaacagttaacaatttatttttataaatataattgttagtttgtttggtaggtggtgtttgagctttggctaaaggtagttttcctttagtattggtggctgttttggtcattgacgcattttggatcattgtttgtaaatttgattcagattcatcatcagattctgaggcaatgtctgcccaagattttttgattatttttggaaatttggtcagacccatgtcttgaagggcctgaagggtttcaattggccatgcatagtcggccgatgtttgtttggcggttgccggtttgggagattcctgagtggatggctcaggtttgattgaggcaatctgggttgatgacccttctaaattgtttttctggg

SEQ ID NO: 16188 - DNA, 1176 bp, Glycine max
  Gm_smallRNAprecursor_9021
tacttgttctggatccgctttggatgagtcaaattgtgtccaccattttacaaatgcgtgtctttgtagtgatggatattggtttgtcttttcagtcttgctgtaacgatattgccatgagaatatccatgacagtgcaaagcttgaaaagtatttaagatctgctggaattcgtgattcctgcgaattgtattgtttcttaaattgggaaaatccttgttggaccgtttctgggaatatctctgggattggtccaaagaagtcccaccattgcaaaaaccaattgagaaaattgtaaattgtgttggtcttgaaatatatcagccatgaatgcttgaagcgggtattttggtgccaaaacaccttagtccaagcatcaacgtaatcccaataggtataacctaccggatcaaatggaactgaaaatctctttcctttgttcaagtccgaaccaaagtgtctcggttgaagaacttttagtatttggatggttgagtgggtgtttaaggtttggtcttttggatctttgaagtgtttgatagatactgagtttgaatctaccaaaatcaattcataaaaagttcttgtcttcaggatggtggttggtttgtagtgaaatcctggtgggaaagccttggctgtcgccttgaagggatttttgtcccaaaattcaggttccatctgcaaaacagttaacaatttatttttataaatataattgttagtttgtttggtaggtggtgtttgagctttggctaaaggtagttttcctttagtattggtggctgttttggtcattgacgcattttggatcattgtttgtaaatttgattcagattcatcatcagattctgaggcaatgtctgcccaagattttttgattatttttggaaatttggtcagacccatgtcttgaagggcctgaagggtttcaattggccatgcatagtcggccgatgtttgtttggcggttgccggtttgggagattcctgagtggatggctcaggtttgattgaggcaatctgggttgatgacccttctaaattgtttttctgggtagatgacccagcctgggttggtgacccagaagaggtagatgatttcttgatggttggctctggaagagccagcctggctcctttgcctgtactccttcctccccgtagggagattcc

SEQ ID NO: 16189 - DNA, 1183 bp, Glycine max
  Gm_smallRNAprecursor_9022
tacttgttctggatccgctttggatgagtcaaattgtgtccaccattttacaaatgcgtgtctttgtagtgatggatattggtttgtcttttcagtcttgctgtaacgatattgccatgagaatatccatgacagtgcaaagcttgaaaagtatttaagatctgctggaattcgtgattcctgcgaattgtattgtttcttaaattgggaaaatccttgttggaccgtttctgggaatatctctgggattggtccaaagaagtcccaccattgcaaaaaccaattgagaaaattgtaaattgtgttggtcttgaaatatatcagccatgaatgcttgaagcgggtattttggtgccaaaacaccttagtccaagcatcaacgtaatcccaataggtataacctaccggatcaaatggaactgaaaatctctttcctttgttcaagtccgaaccaaagtgtctcggttgaagaacttttagtatttggatggttgagtgggtgtttaaggtttggtcttttggatctttgaagtgtttgatagatactgagtttgaatctaccaaaatcaattcataaaaagttcttgtcttcaggatggtggttggtttgtagtgaaatcctggtgggaaagccttggctgtcgccttgaagggatttttgtcccaaaattcaggttccatctgcaaaacagttaacaatttatttttataaatataattgttagtttgtttggtaggtggtgtttgagctttggctaaaggtagttttcctttagtattggtggctgttttggtcattgacgcattttggatcattgtttgtaaatttgattcagattcatcatcagattctgaggcaatgtctgcccaagattttttgattatttttggaaatttggtcagacccatgtcttgaagggcctgaagggtttcaattggccatgcatagtcggccgatgtttgtttggcggttgccggtttgggagattcctgagtggatggctcaggtttgattgaggcaatctgggttgatgacccttctaaattgtttttctgggtagatgacccagcctgggttggtgacccagaagaggtagatgatttcttgatggttggctctggaagagccagcctggctcctttgcctgtactccttcctccccgtagggagattcccgatgcc

SEQ ID NO: 16190 - DNA, 1159 bp, Glycine max
  Gm_smallRNAprecursor_9023
ctggatccgctttggatgagtcaaattgtgtccaccattttacaaatgcgtgtctttgtagtgatggatattggtttgtcttttcagtcttgctgtaacgatattgccatgagaatatccatgacagtgcaaagcttgaaaagtatttaagatctgctggaattcgtgattcctgcgaattgtattgtttcttaaattgggaaaatccttgttggaccgtttctgggaatatctctgggattggtccaaagaagtcccaccattgcaaaaaccaattgagaaaattgtaaattgtgttggtcttgaaatatatcagccatgaatgcttgaagcgggtattttggtgccaaaacaccttagtccaagcatcaacgtaatcccaataggtataacctaccggatcaaatggaactgaaaatctctttcctttgttcaagtccgaaccaaagtgtctcggttgaagaacttttagtatttggatggttgagtgggtgtttaaggtttggtcttttggatctttgaagtgtttgatagatactgagtttgaatctaccaaaatcaattcataaaaagttcttgtcttcaggatggtggttggtttgtagtgaaatcctggtgggaaagccttggctgtcgccttgaagggatttttgtcccaaaattcaggttccatctgcaaaacagttaacaatttatttttataaatataattgttagtttgtttggtaggtggtgtttgagctttggctaaaggtagttttcctttagtattggtggctgttttggtcattgacgcattttggatcattgtttgtaaatttgattcagattcatcatcagattctgaggcaatgtctgcccaagattttttgattatttttggaaatttggtcagacccatgtcttgaagggcctgaagggtttcaattggccatgcatagtcggccgatgtttgtttggcggttgccggtttgggagattcctgagtggatggctcaggtttgattgaggcaatctgggttgatgacccttctaaattgtttttctgggtagatgacccagcctgggttggtgacccagaagaggtagatgatttcttgatggttggctctggaagagccagcctggctcctttgcctgtactccttcctccccgtag

SEQ ID NO: 16191 - DNA, 1098 bp, Glycine max
  Gm_smallRNAprecursor_9024
gtgtctttgtagtgatggatattggtttgtcttttcagtcttgctgtaacgatattgccatgagaatatccatgacagtgcaaagcttgaaaagtatttaagatctgctggaattcgtgattcctgcgaattgtattgtttcttaaattgggaaaatccttgttggaccgtttctgggaatatctctgggattggtccaaagaagtcccaccattgcaaaaaccaattgagaaaattgtaaattgtgttggtcttgaaatatatcagccatgaatgcttgaagcgggtattttggtgccaaaacaccttagtccaagcatcaacgtaatcccaataggtataacctaccggatcaaatggaactgaaaatctctttcctttgttcaagtccgaaccaaagtgtctcggttgaagaacttttagtatttggatggttgagtgggtgtttaaggtttggtcttttggatctttgaagtgtttgatagatactgagtttgaatctaccaaaatcaattcataaaaagttcttgtcttcaggatggtggttggtttgtagtgaaatcctggtgggaaagccttggctgtcgccttgaagggatttttgtcccaaaattcaggttccatctgcaaaacagttaacaatttatttttataaatataattgttagtttgtttggtaggtggtgtttgagctttggctaaaggtagttttcctttagtattggtggctgttttggtcattgacgcattttggatcattgtttgtaaatttgattcagattcatcatcagattctgaggcaatgtctgcccaagattttttgattatttttggaaatttggtcagacccatgtcttgaagggcctgaagggtttcaattggccatgcatagtcggccgatgtttgtttggcggttgccggtttgggagattcctgagtggatggctcaggtttgattgaggcaatctgggttgatgacccttctaaattgtttttctgggtagatgacccagcctgggttggtgacccagaagaggtagatgatttcttgatggttggctctggaagagccagcctggctcctttgcctgtactcct

SEQ ID NO: 16192 - DNA, 1098 bp, Glycine max
  Gm_smallRNAprecursor_9025
ttggtttgtcttttcagtcttgctgtaacgatattgccatgagaatatccatgacagtgcaaagcttgaaaagtatttaagatctgctggaattcgtgattcctgcgaattgtattgtttcttaaattgggaaaatccttgttggaccgtttctgggaatatctctgggattggtccaaagaagtcccaccattgcaaaaaccaattgagaaaattgtaaattgtgttggtcttgaaatatatcagccatgaatgcttgaagcgggtattttggtgccaaaacaccttagtccaagcatcaacgtaatcccaataggtataacctaccggatcaaatggaactgaaaatctctttcctttgttcaagtccgaaccaaagtgtctcggttgaagaacttttagtatttggatggttgagtgggtgtttaaggtttggtcttttggatctttgaagtgtttgatagatactgagtttgaatctaccaaaatcaattcataaaaagttcttgtcttcaggatggtggttggtttgtagtgaaatcctggtgggaaagccttggctgtcgccttgaagggatttttgtcccaaaattcaggttccatctgcaaaacagttaacaatttatttttataaatataattgttagtttgtttggtaggtggtgtttgagctttggctaaaggtagttttcctttagtattggtggctgttttggtcattgacgcattttggatcattgtttgtaaatttgattcagattcatcatcagattctgaggcaatgtctgcccaagattttttgattatttttggaaatttggtcagacccatgtcttgaagggcctgaagggtttcaattggccatgcatagtcggccgatgtttgtttggcggttgccggtttgggagattcctgagtggatggctcaggtttgattgaggcaatctgggttgatgacccttctaaattgtttttctgggtagatgacccagcctgggttggtgacccagaagaggtagatgatttcttgatggttggctctggaagagccagcctggctcctttgcctgtactccttcctccccgtagggagattcc

SEQ ID NO: 16193 - DNA, 1090 bp, Glycine max
  Gm_smallRNAprecursor_9026
gcgaattgtattgtttcttaaattgggaaaatccttgttggaccgtttctgggaatatctctgggattggtccaaagaagtcccaccattgcaaaaaccaattgagaaaattgtaaattgtgttggtcttgaaatatatcagccatgaatgcttgaagcgggtattttggtgccaaaacaccttagtccaagcatcaacgtaatcccaataggtataacctaccggatcaaatggaactgaaaatctctttcctttgttcaagtccgaaccaaagtgtctcggttgaagaacttttagtatttggatggttgagtgggtgtttaaggtttggtcttttggatctttgaagtgtttgatagatactgagtttgaatctaccaaaatcaattcataaaaagttcttgtcttcaggatggtggttggtttgtagtgaaatcctggtgggaaagccttggctgtcgccttgaagggatttttgtcccaaaattcaggttccatctgcaaaacagttaacaatttatttttataaatataattgttagtttgtttggtaggtggtgtttgagctttggctaaaggtagttttcctttagtattggtggctgttttggtcattgacgcattttggatcattgtttgtaaatttgattcagattcatcatcagattctgaggcaatgtctgcccaagattttttgattatttttggaaatttggtcagacccatgtcttgaagggcctgaagggtttcaattggccatgcatagtcggccgatgtttgtttggcggttgccggtttgggagattcctgagtggatggctcaggtttgattgaggcaatctgggttgatgacccttctaaattgtttttctgggtagatgacccagcctgggttggtgacccagaagaggtagatgatttcttgatggttggctctggaagagccagcctggctcctttgcctgtactccttcctccccgtagggagattcccgatgccttaggaggcattaccacttttctgtaagaattcacgggtaaggtagtcaggtagtgaatttgaggtgcccttgatgtattctatgtcaa

SEQ ID NO: 16194 - DNA, 1113 bp, Glycine max
  Gm_smallRNAprecursor_9027
ggaaatttggtcagacccatgtcttgaagggcctgaagggtttcaattggccatgcatagtcggccgatgtttgtttggcggttgccggtttgggagattcctgagtggatggctcaggtttgattgaggcaatctgggttgatgacccttctaaattgtttttctgggtagatgacccagcctgggttggtgacccagaagaggtagatgatttcttgatggttggctctggaagagccagcctggctcctttgcctgtactccttcctccccgtagggagattcccgatgccttaggaggcattaccacttttctgtaagaattcacgggtaaggtagtcaggtagtgaatttgaggtgcccttgatgtattctatgtcaaaatcaaagacacttaaaattgcttgccatcgtgcaaaaatttgttttgaggcaaggtttttaacatctttttgtaaaatatctttggctgatttacaatcaaccctgattaaaaatttttggtttaataaatccgattgaaatttggaaatgcacaaaacaattgctaaaacttcttttttaacagttgaatattttaattgtgcaggattccaatgttttgatgtatatgcaatgacatgatcttggccatggactctttgtttgaggatgccaccataacctatgtctgaagcatcagtttcaacaattttaaatgcatgtggaataggaagatacagacatttaatggattggactttgactttgacttctttaaccgtttgtgtatggaggtcagaccaaggaggcggatttttcttcagcctatcatgtaatggcttgacaatattatttaaataggggacaaattctcctacgtaatttagacaacctagaaatctttgtaactgggttttgtctaagatttggttggggaatttgctagcaaactctattgatctttcgattggaatgattgtaccttgatatatattgtgaccaaggaatcgaattcgagtttggaaaagattgatttttgatttggagactgccaaaccattttgtttgatgatatgtatgaaggtttggagatgtttgaaatgttggtcaatgttttgggaaaagattaa

SEQ ID NO: 16195 - DNA, 1113 bp, Glycine max; identical to SEQ ID NO: 16194
  Gm_smallRNAprecursor_9028

SEQ ID NO: 16196 - DNA, 1114 bp, Glycine max
  Gm_smallRNAprecursor_9029
ggaaatttggtcagacccatgtcttgaagggcctgaagggtttcaattggccatgcatagtcggccgatgtttgtttggcggttgccggtttgggagattcctgagtggatggctcaggtttgattgaggcaatctgggttgatgacccttctaaattgtttttctgggtagatgacccagcctgggttggtgacccagaagaggtagatgatttcttgatggttggctctggaagagccagcctggctcctttgcctgtactccttcctccccgtagggagattcccgatgccttaggaggcattaccacttttctgtaagaattcacgggtaaggtagtcaggtagtgaatttgaggtgcccttgatgtattctatgtcaaaatcaaagacacttaaaattgcttgccatcgtgcaaaaatttgttttgaggcaaggtttttaacatctttttgtaaaatatctttggctgatttacaatcaaccctgattaaaaatttttggtttaataaatccgattgaaatttggaaatgcacaaaacaattgctaaaacttcttttttaacagttgaatattttaattgtgcaggattccaatgttttgatgtatatgcaatgacatgatcttggccatggactctttgtttgaggatgccaccataacctatgtctgaagcatcagtttcaacaattttaaatgcatgtggaataggaagatacagacatttaatggattggactttgactttgacttctttaaccgtttgtgtatggaggtcagaccaaggaggcggatttttcttcagcctatcatgtaatggcttgacaatattatttaaataggggacaaattctcctacgtaatttagacaacctagaaatctttgtaactgggttttgtctaagatttggttggggaatttgctagcaaactctattgatctttcgattggaatgattgtaccttgatatatattgtgaccaaggaatcgaattcgagtttggaaaagattgatttttgatttggagactgccaaaccattttgtttgatgatatgtatgaaggtttggagatgtttgaaatgttggtcaatgttttgggaaaagattaaa

SEQ ID NO: 16197 - DNA, 1207 bp, Glycine max
  Gm_smallRNAprecursor_9030
ggaaatttggtcagacccatgtcttgaagggcctgaagggtttcaattggccatgcatagtcggccgatgtttgtttggcggttgccggtttgggagattcctgagtggatggctcaggtttgattgaggcaatctgggttgatgacccttctaaattgtttttctgggtagatgacccagcctgggttggtgacccagaagaggtagatgatttcttgatggttggctctggaagagccagcctggctcctttgcctgtactccttcctccccgtagggagattcccgatgccttaggaggcattaccacttttctgtaagaattcacgggtaaggtagtcaggtagtgaatttgaggtgcccttgatgtattctatgtcaaaatcaaagacacttaaaattgcttgccatcgtgcaaaaatttgttttgaggcaaggtttttaacatctttttgtaaaatatctttggctgatttacaatcaaccctgattaaaaatttttggtttaataaatccgattgaaatttggaaatgcacaaaacaattgctaaaacttcttttttaacagttgaatattttaattgtgcaggattccaatgttttgatgtatatgcaatgacatgatcttggccatggactctttgtttgaggatgccaccataacctatgtctgaagcatcagtttcaacaattttaaatgcatgtggaataggaagatacagacatttaatggattggactttgactttgacttctttaaccgtttgtgtatggaggtcagaccaaggaggcggatttttcttcagcctatcatgtaatggcttgacaatattatttaaataggggacaaattctcctacgtaatttagacaacctagaaatctttgtaactgggttttgtctaagatttggttggggaatttgctagcaaactctattgatctttcgattggaatgattgtaccttgatatatattgtgaccaaggaatcgaattcgagtttggaaaagattgatttttgatttggagactgccaaaccattttgtttgatgatatgtatgaaggtttggagatgtttgaaatgttggtcaatgttttgggaaaagattaaaacatcatctatgtagacaatgacaaattttgaataaggattaaaaatatcattcataattttttgaaattctgaaggggcattcttcagtccg

SEQ ID NO: 16198 - DNA, 1035 bp, Glycine max
  Gm_smallRNAprecursor_9031
gcggttgccggtttgggagattcctgagtggatggctcaggtttgattgaggcaatctgggttgatgacccttctaaattgtttttctgggtagatgacccagcctgggttggtgacccagaagaggtagatgatttcttgatggttggctctggaagagccagcctggctcctttgcctgtactccttcctccccgtagggagattcccgatgccttaggaggcattaccacttttctgtaagaattcacgggtaaggtagtcaggtagtgaatttgaggtgcccttgatgtattctatgtcaaaatcaaagacacttaaaattgcttgccatcgtgcaaaaatttgttttgaggcaaggtttttaacatctttttgtaaaatatctttggctgatttacaatcaaccctgattaaaaatttttggtttaataaatccgattgaaatttggaaatgcacaaaacaattgctaaaacttcttttttaacagttgaatattttaattgtgcaggattccaatgttttgatgtatatgcaatgacatgatcttggccatggactctttgtttgaggatgccaccataacctatgtctgaagcatcagtttcaacaattttaaatgcatgtggaataggaagatacagacatttaatggattggactttgactttgacttctttaaccgtttgtgtatggaggtcagaccaaggaggcggatttttcttcagcctatcatgtaatggcttgacaatattatttaaataggggacaaattctcctacgtaatttagacaacctagaaatctttgtaactgggttttgtctaagatttggttggggaatttgctagcaaactctattgatctttcgattggaatgattgtaccttgatatatattgtgaccaaggaatcgaattcgagtttggaaaagattgatttttgatttggagactgccaaaccattttgtttgatgatatgtatgaaggtttggagatgtttgaaatgttggtcaatgttttgggaaaagattaa

SEQ ID NO: 16199 - DNA, 1247 bp, Glycine max
  Gm_smallRNAprecursor_9032
agatgatttcttgatggttggctctggaagagccagcctggctcctttgcctgtactccttcctccccgtagggagattcccgatgccttaggaggcattaccacttttctgtaagaattcacgggtaaggtagtcaggtagtgaatttgaggtgcccttgatgtattctatgtcaaaatcaaagacacttaaaattgcttgccatcgtgcaaaaatttgttttgaggcaaggtttttaacatctttttgtaaaatatctttggctgatttacaatcaaccctgattaaaaatttttggtttaataaatccgattgaaatttggaaatgcacaaaacaattgctaaaacttcttttttaacagttgaatattttaattgtgcaggattccaatgttttgatgtatatgcaatgacatgatcttggccatggactctttgtttgaggatgccaccataacctatgtctgaagcatcagtttcaacaattttaaatgcatgtggaataggaagatacagacatttaatggattggactttgactttgacttctttaaccgtttgtgtatggaggtcagaccaaggaggcggatttttcttcagcctatcatgtaatggcttgacaatattatttaaataggggacaaattctcctacgtaatttagacaacctagaaatctttgtaactgggttttgtctaagatttggttggggaatttgctagcaaactctattgatctttcgattggaatgattgtaccttgatatatattgtgaccaaggaatcgaattcgagtttggaaaagattgatttttgatttggagactgccaaaccattttgtttgatgatatgtatgaaggtttggagatgtttgaaatgttggtcaatgttttgggaaaagattaaaacatcatctatgtagacaatgacaaattttgaataaggattaaaaatatcattcataattttttgaaattctgaaggggcattcttcagtccgaatggcatcacgttccattcatattgcccgaaaggtacagtaaacgctgttttgtacctatctgattcttggatttggatttgccaaaatccagatttcatatcaaattttgaaaatatctttgcagaatttaatctgttaagcaaatcttttttgtttggaataggatatctaatccattgtaatgcttgatttaatggtttgtaatttatgactaagcggggtgttccacgctcaatctcagat

SEQ ID NO: 16200 - DNA, 1246 bp, Glycine max
  Gm_smallRNAprecursor_9033
gatgatttcttgatggttggctctggaagagccagcctggctcctttgcctgtactccttcctccccgtagggagattcccgatgccttaggaggcattaccacttttctgtaagaattcacgggtaaggtagtcaggtagtgaatttgaggtgcccttgatgtattctatgtcaaaatcaaagacacttaaaattgcttgccatcgtgcaaaaatttgttttgaggcaaggtttttaacatctttttgtaaaatatctttggctgatttacaatcaaccctgattaaaaatttttggtttaataaatccgattgaaatttggaaatgcacaaaacaattgctaaaacttcttttttaacagttgaatattttaattgtgcaggattccaatgttttgatgtatatgcaatgacatgatcttggccatggactctttgtttgaggatgccaccataacctatgtctgaagcatcagtttcaacaattttaaatgcatgtggaataggaagatacagacatttaatggattggactttgactttgacttctttaaccgtttgtgtatggaggtcagaccaaggaggcggatttttcttcagcctatcatgtaatggcttgacaatattatttaaataggggacaaattctcctacgtaatttagacaacctagaaatctttgtaactgggttttgtctaagatttggttggggaatttgctagcaaactctattgatctttcgattggaatgattgtaccttgatatatattgtgaccaaggaatcgaattcgagtttggaaaagattgatttttgatttggagactgccaaaccattttgtttgatgatatgtatgaaggtttggagatgtttgaaatgttggtcaatgttttgggaaaagattaaaacatcatctatgtagacaatgacaaattttgaataaggattaaaaatatcattcataattttttgaaattctgaaggggcattcttcagtccgaatggcatcacgttccattcatattgcccgaaaggtacagtaaacgctgttttgtacctatctgattcttggatttggatttgccaaaatccagatttcatatcaaattttgaaaatatctttgcagaatttaatctgttaagcaaatcttttttgtttggaataggatatctaatccattgtaatgcttgatttaatggtttgtaatttatgactaagcggggtgttccacgctcaatctcagat

SEQ ID NO: 16201 - DNA, 1031 bp, Glycine max
  Gm_smallRNAprecursor_9034
ctttttgtaaaatatctttggctgatttacaatcaaccctgattaaaaatttttggtttaataaatccgattgaaatttggaaatgcacaaaacaattgctaaaacttcttttttaacagttgaatattttaattgtgcaggattccaatgttttgatgtatatgcaatgacatgatcttggccatggactctttgtttgaggatgccaccataacctatgtctgaagcatcagtttcaacaattttaaatgcatgtggaataggaagatacagacatttaatggattggactttgactttgacttctttaaccgtttgtgtatggaggtcagaccaaggaggcggatttttcttcagcctatcatgtaatggcttgacaatattatttaaataggggacaaattctcctacgtaatttagacaacctagaaatctttgtaactgggttttgtctaagatttggttggggaatttgctagcaaactctattgatctttcgattggaatgattgtaccttgatatatattgtgaccaaggaatcgaattcgagtttggaaaagattgatttttgatttggagactgccaaaccattttgtttgatgatatgtatgaaggtttggagatgtttgaaatgttggtcaatgttttgggaaaagattaaaacatcatctatgtagacaatgacaaattttgaataaggattaaaaatatcattcataattttttgaaattctgaaggggcattcttcagtccgaatggcatcacgttccattcatattgcccgaaaggtacagtaaacgctgttttgtacctatctgattcttggatttggatttgccaaaatccagatttcatatcaaattttgaaaatatctttgcagaatttaatctgttaagcaaatcttttttgtttggaataggatatctaatccattgtaatgcttgatttaatggtttgtaatttatgactaagcggggtgttccacgctcaatctcagattgtttgttaacataaaaagccgcacaa

SEQ ID NO: 16202 - DNA, 1234 bp, Glycine max
  Gm_smallRNAprecursor_9035
aatcaaccctgattaaaaatttttggtttaataaatccgattgaaatttggaaatgcacaaaacaattgctaaaacttcttttttaacagttgaatattttaattgtgcaggattccaatgttttgatgtatatgcaatgacatgatcttggccatggactctttgtttgaggatgccaccataacctatgtctgaagcatcagtttcaacaattttaaatgcatgtggaataggaagatacagacatttaatggattggactttgactttgacttctttaaccgtttgtgtatggaggtcagaccaaggaggcggatttttcttcagcctatcatgtaatggcttgacaatattatttaaataggggacaaattctcctacgtaatttagacaacctagaaatctttgtaactgggttttgtctaagatttggttggggaatttgctagcaaactctattgatctttcgattggaatgattgtaccttgatatatattgtgaccaaggaatcgaattcgagtttggaaaagattgatttttgatttggagactgccaaaccattttgtttgatgatatgtatgaaggtttggagatgtttgaaatgttggtcaatgttttgggaaaagattaaaacatcatctatgtagacaatgacaaattttgaataaggattaaaaatatcattcataattttttgaaattctgaaggggcattcttcagtccgaatggcatcacgttccattcatattgcccgaaaggtacagtaaacgctgttttgtacctatctgattcttggatttggatttgccaaaatccagatttcatatcaaattttgaaaatatctttgcagaatttaatctgttaagcaaatcttttttgtttggaataggatatctaatccattgtaatgcttgatttaatggtttgtaatttatgactaagcggggtgttccacgctcaatctcagattgtttgttaacataaaaagccgcacaagaccatgggcttttgcttttccggattaggcctttatcaagcaaatccttgatttccttttgacagtattgaagaagttcttcattcatttggattggtctggcttttgtgggaatttgtttttccctaaagtctttctcataagggagatcgacaatatgtttctttctgtcccaaaatgcatgtggcaattcagaacaaacggtcgattcaatatgatttaataaagattg

SEQ ID NO: 16203 - DNA, 1061 bp, Glycine max
  Gm_smallRNAprecursor_9036
tatttaaataggggacaaattctcctacgtaatttagacaacctagaaatctttgtaactgggttttgtctaagatttggttggggaatttgctagcaaactctattgatctttcgattggaatgattgtaccttgatatatattgtgaccaaggaatcgaattcgagtttggaaaagattgatttttgatttggagactgccaaaccattttgtttgatgatatgtatgaaggtttggagatgtttgaaatgttggtcaatgttttgggaaaagattaaaacatcatctatgtagacaatgacaaattttgaataaggattaaaaatatcattcataattttttgaaattctgaaggggcattcttcagtccgaatggcatcacgttccattcatattgcccgaaaggtacagtaaacgctgttttgtacctatctgattcttggatttggatttgccaaaatccagatttcatatcaaattttgaaaatatctttgcagaatttaatctgttaagcaaatcttttttgtttggaataggatatctaatccattgtaatgcttgatttaatggtttgtaatttatgactaagcggggtgttccacgctcaatctcagattgtttgttaacataaaaagccgcacaagaccatgggcttttgcttttccggattaggcctttatcaagcaaatccttgatttccttttgacagtattgaagaagttcttcattcatttggattggtctggcttttgtgggaatttgtttttccctaaagtctttctcataagggagatcgacaatatgtttctttctgtcccaaaatgcatgtggcaattcagaacaaacggtcgattcaatatgatttaataaagattgaattctttcttttacttggggttttcccagttgtatctgaatattattaaaagatacttcttctaataagtagttaatttgattaatcttattttctataagatttatatttctggaaattggtttagtagaaaaattaaatgtaatttttcttcctaaataatttgtggttattccttca

SEQ ID NO: 16204 - DNA, 1127 bp, Glycine max
  Gm_smallRNAprecursor_9037
ggacaaattctcctacgtaatttagacaacctagaaatctttgtaactgggttttgtctaagatttggttggggaatttgctagcaaactctattgatctttcgattggaatgattgtaccttgatatatattgtgaccaaggaatcgaattcgagtttggaaaagattgatttttgatttggagactgccaaaccattttgtttgatgatatgtatgaaggtttggagatgtttgaaatgttggtcaatgttttgggaaaagattaaaacatcatctatgtagacaatgacaaattttgaataaggattaaaaatatcattcataattttttgaaattctgaaggggcattcttcagtccgaatggcatcacgttccattcatattgcccgaaaggtacagtaaacgctgttttgtacctatctgattcttggatttggatttgccaaaatccagatttcatatcaaattttgaaaatatctttgcagaatttaatctgttaagcaaatcttttttgtttggaataggatatctaatccattgtaatgcttgatttaatggtttgtaatttatgactaagcggggtgttccacgctcaatctcagattgtttgttaacataaaaagccgcacaagaccatgggcttttgcttttccggattaggcctttatcaagcaaatccttgatttccttttgacagtattgaagaagttcttcattcatttggattggtctggcttttgtgggaatttgtttttccctaaagtctttctcataagggagatcgacaatatgtttctttctgtcccaaaatgcatgtggcaattcagaacaaacggtcgattcaatatgatttaataaagattgaattctttcttttacttggggttttcccagttgtatctgaatattattaaaagatacttcttctaataagtagttaatttgattaatcttattttctataagatttatatttctggaaattggtttagtagaaaaattaaatgtaatttttcttcctaaataatttgtggttattccttcattagatatttggatgggaaacagggctctaatgaagggcgttcctaagattacttcattcttaaggttttttaccaga

SEQ ID NO: 16205 - DNA, 1177 bp, Glycine max
  Gm_smallRNAprecursor_9038
tgttttctgtttaggattttccatttctctactggttgatggtttgtgtgagtatctcctccttggaaatctctttgtattgaccggtttattctcatggatttcttttttagaggattgttttttcttttgttttggacaggtcggtagaccaaattgttcgcagaaagaacctaaatctctctttgtttgagccttttctttggctaattgcctctgaattttgtcatcctgacaaatttttaaggctaccttttggacgtaagaaattaattgaccatagcttaaactttcatatggaatatctccattggcagattgactacggattttatctctaaccttgtctcctaatgatctgggaagaccagctagaaatttttctttccaaaaaggttgttgactatcttctcttgtgtaaaccctagttaggaaagtatctctataccacctaaaatccgctaaggttctacacttaagatttgacaataattctgcagacctatctttccacaaggatgggtctccaatgaaatgttgggctattgtaaaaattaatgtgttaacagcgtcaggaatctctttatcatcgtcattagtaatgacttttccattgagatccgtcttaactgcgctgtaaatttttgatttctcttcgttagtgagataattatcccaccatccttttaattgtccagaaaatcctgccactaagatatctataatggtctcttctgaacattcatgggaggtttggtaagccgtagccaccatggtcatatgttggagtgtattcatgatgttatactccgtttgtgcatctatgttccattcatagatgttgtttgcactaaaactcttaaaattgttttcacctctttcttctaatagaaggtcaggggcagttggacgttgataatataatttggagggtgttttccagtgtttggaattaattggatttatattcttttctgacactgatcctatctcagttgtgttatctgagttttggtcactatcttcattaataacattgattaatttggaggtacttcttgttaccattttggaagtattttccgaggcttggggggtatctggaatgactttaagtaaactaccaatcttgtttagtaattcactatggttgtcacctacgccttcaattaaggat

SEQ ID NO: 16206 - DNA, 1158 bp, Glycine max
  Gm_smallRNAprecursor_9039
acccatctttcgggaagagttacttcatcccattttatttttcttgggagagacatgttagcctttgtcatatcagtgataaacaaggttgtttctcctttttgaggttttaacaggactctagatgcacaagtattcatgaccttgtactggatcctataaattaaggctgctgggattgatccttctttcatgtcaaggccatgaaagtggatgtttaagaacagagagtcaagaatgtttctatccatcagactcactgttttgtttggataacaattaaaatatattggaccctgtcctaggctggtttcgactgttccaattagggagtcttcaaattgattatgcctaatatctcttagacacattaaaactgttgcatctatgcccatatcaattaagggcttgatggctacttgtacacaaccgatgtgtaaatatttatacatacggctatgttcataaattgaattttttgaaagtagatgaaattcttcccctatatcttgtcctagaggaatattgttttctactgttttgattatgtaatcaaagttgtgtttgtctttaattgtttcaggaacgtatagttgatcctgagggatttctggaatgttcagtcatccatgttttgattaatatcttcgaatcggacttcctcatcgaagagattgtgttttggggcgacctcttgggtctggttatcttgatcatttaagagattggtgtttcttgaagaagatgaagaggaggaattcgagcgaaaagaaatacgggaaaaggatcgcaataatctagacatgattaaaacattctctaatatctttgccttcatttggttccataggaatctctccataaggctatatgttacagaacttcttggatctgaataaatgaaaaagaagatttttttttttttttgaattacagacaatatagtttgaacattactcctatagccaccagtatattatgtctcaatattttatttgaacaatacaccttagccttactgccctttctcatccacgggacttactgctacattatcattcaactaaaatatcagactgctgtgcttccagaaaatactgttcaaacacatactgtttaaattaaaattactgtacatgcttcagatccataagttca

SEQ ID NO: 16207 - DNA, 1224 bp, Glycine max
  Gm_smallRNAprecursor_9040
tatgttcataaattgaattttttgaaagtagatgaaattcttcccctatatcttgtcctagaggaatattgttttctactgttttgattatgtaatcaaagttgtgtttgtctttaattgtttcaggaacgtatagttgatcctgagggatttctggaatgttcagtcatccatgttttgattaatatcttcgaatcggacttcctcatcgaagagattgtgttttggggcgacctcttgggtctggttatcttgatcatttaagagattggtgtttcttgaagaagatgaagaggaggaattcgagcgaaaagaaatacgggaaaaggatcgcaataatctagacatgattaaaacattctctaatatctttgccttcatttggttccataggaatctctccataaggctatatgttacagaacttcttggatctgaataaatgaaaaagaagatttttttttttttttgaattacagacaatatagtttgaacattactcctatagccaccagtatattatgtctcaatattttatttgaacaatacaccttagccttactgccctttctcatccacgggacttactgctacattatcattcaactaaaatatcagactgctgtgcttccagaaaatactgttcaaacacatactgtttaaattaaaattactgtacatgcttcagatccataagttcagttaacatatgcccttacggacactattcctacttccccatcaggctctgataccagaggtcagcggagtaggatcaaacggacagataggaagtaagaatgcagtatgattaatgaaatgaaaatataaacttgaaaacagatatcaaggtcacaccggagaccggcttacaaaacccaggttttcataaacaaagaaactgaagcggcggcagagccgcacaggatcggtgaagggagaagagagaaagatgaaaaatagaaatttattgaatctagaaagaagcgcttacaaaaatcttgtttcagagcacctctcttccgaaacctgaaaaaatggctaaatgaaagggtgtctcacaacatacttgaggactccttatatagccaaaaatctaagaccggtagttgccggtagttttgaccgggactatttgactgtttgttacaagacaagtagttttgaccgggactttaatggctacaggacaggtagtattgtccagcattaattacacattaa

SEQ ID NO: 16208 - DNA, 1141 bp, Glycine max
  Gm_smallRNAprecursor_9041
tgtgcttccagaaaatactgttcaaacacatactgtttaaattaaaattactgtacatgcttcagatccataagttcagttaacatatgcccttacggacactattcctacttccccatcaggctctgataccagaggtcagcggagtaggatcaaacggacagataggaagtaagaatgcagtatgattaatgaaatgaaaatataaacttgaaaacagatatcaaggtcacaccggagaccggcttacaaaacccaggttttcataaacaaagaaactgaagcggcggcagagccgcacaggatcggtgaagggagaagagagaaagatgaaaaatagaaatttattgaatctagaaagaagcgcttacaaaaatcttgtttcagagcacctctcttccgaaacctgaaaaaatggctaaatgaaagggtgtctcacaacatacttgaggactccttatatagccaaaaatctaagaccggtagttgccggtagttttgaccgggactatttgactgtttgttacaagacaagtagttttgaccgggactttaatggctacaggacaggtagtattgtccagcattaattacacattaattacaaacagacggttttgtgaccgaaattaaatttaatctaaacagataccaaaacaatcatcttcgttttggtaaaagggatcttctttgtcttcttcagcaaaacttgtttcttccttctttgaggatgaagcttcttcttcctgttgtaacatttgtagaacttccttcagatttttagctaagacctcctttgatgtcgatcctgctaaaaatgctgccagatgagacttttggttcaaaaacacagaagtctctggatcagctgccttgaggaattctggatgggattggaaccatagttttacttgttctggatccgctttggatgagtcaaattgtgtccaccattttacaaatgtgtgtctttgtagtgatggatattggtttgtcttttcaatcttgctgtaacgatattgccatgagaatatccatgacagtgcaaagcttgaaaagtatttaagatctgctggaattcgtgattcctgcgaattgtattgtttcttaaattgggaaaatccttgttggaccgtttctg

SEQ ID NO: 16209 - DNA, 1154 bp, Glycine max
  Gm_smallRNAprecursor_9042
tgtgcttccagaaaatactgttcaaacacatactgtttaaattaaaattactgtacatgcttcagatccataagttcagttaacatatgcccttacggacactattcctacttccccatcaggctctgataccagaggtcagcggagtaggatcaaacggacagataggaagtaagaatgcagtatgattaatgaaatgaaaatataaacttgaaaacagatatcaaggtcacaccggagaccggcttacaaaacccaggttttcataaacaaagaaactgaagcggcggcagagccgcacaggatcggtgaagggagaagagagaaagatgaaaaatagaaatttattgaatctagaaagaagcgcttacaaaaatcttgtttcagagcacctctcttccgaaacctgaaaaaatggctaaatgaaagggtgtctcacaacatacttgaggactccttatatagccaaaaatctaagaccggtagttgccggtagttttgaccgggactatttgactgtttgttacaagacaagtagttttgaccgggactttaatggctacaggacaggtagtattgtccagcattaattacacattaattacaaacagacggttttgtgaccgaaattaaatttaatctaaacagataccaaaacaatcatcttcgttttggtaaaagggatcttctttgtcttcttcagcaaaacttgtttcttccttctttgaggatgaagcttcttcttcctgttgtaacatttgtagaacttccttcagatttttagctaagacctcctttgatgtcgatcctgctaaaaatgctgccagatgagacttttggttcaaaaacacagaagtctctggatcagctgccttgaggaattctggatgggattggaaccatagttttacttgttctggatccgctttggatgagtcaaattgtgtccaccattttacaaatgtgtgtctttgtagtgatggatattggtttgtcttttcaatcttgctgtaacgatattgccatgagaatatccatgacagtgcaaagcttgaaaagtatttaagatctgctggaattcgtgattcctgcgaattgtattgtttcttaaattgggaaaatccttgttggaccgtttctgggaatatctctgg

SEQ ID NO: 16210 - DNA, 1209 bp, Glycine max
  Gm_smallRNAprecursor_9043
agcggagtaggatcaaacggacagataggaagtaagaatgcagtatgattaatgaaatgaaaatataaacttgaaaacagatatcaaggtcacaccggagaccggcttacaaaacccaggttttcataaacaaagaaactgaagcggcggcagagccgcacaggatcggtgaagggagaagagagaaagatgaaaaatagaaatttattgaatctagaaagaagcgcttacaaaaatcttgtttcagagcacctctcttccgaaacctgaaaaaatggctaaatgaaagggtgtctcacaacatacttgaggactccttatatagccaaaaatctaagaccggtagttgccggtagttttgaccgggactatttgactgtttgttacaagacaagtagttttgaccgggactttaatggctacaggacaggtagtattgtccagcattaattacacattaattacaaacagacggttttgtgaccgaaattaaatttaatctaaacagataccaaaacaatcatcttcgttttggtaaaagggatcttctttgtcttcttcagcaaaacttgtttcttccttctttgaggatgaagcttcttcttcctgttgtaacatttgtagaacttccttcagatttttagctaagacctcctttgatgtcgatcctgctaaaaatgctgccagatgagacttttggttcaaaaacacagaagtctctggatcagctgccttgaggaattctggatgggattggaaccatagttttacttgttctggatccgctttggatgagtcaaattgtgtccaccattttacaaatgtgtgtctttgtagtgatggatattggtttgtcttttcaatcttgctgtaacgatattgccatgagaatatccatgacagtgcaaagcttgaaaagtatttaagatctgctggaattcgtgattcctgcgaattgtattgtttcttaaattgggaaaatccttgttggaccgtttctgggaatatctctgggattggtccaaagaagtcccaccattgcaaaaaccaattgggaaaattgtaaattgtgttggtcttgaaatatatcagccatgattgcttgaagcgggtattttggtgccaaaacaccttagtccaagcatcaacgtaatcccaataggtataacctatcggatcaaatggaactgaaaatctctttcctttgtt

SEQ ID NO: 16211 - DNA, 1083 bp, Glycine max
  Gm_smallRNAprecursor_9044
ggagtaggatcaaacggacagataggaagtaagaatgcagtatgattaatgaaatgaaaatataaacttgaaaacagatatcaaggtcacaccggagaccggcttacaaaacccaggttttcataaacaaagaaactgaagcggcggcagagccgcacaggatcggtgaagggagaagagagaaagatgaaaaatagaaatttattgaatctagaaagaagcgcttacaaaaatcttgtttcagagcacctctcttccgaaacctgaaaaaatggctaaatgaaagggtgtctcacaacatacttgaggactccttatatagccaaaaatctaagaccggtagttgccggtagttttgaccgggactatttgactgtttgttacaagacaagtagttttgaccgggactttaatggctacaggacaggtagtattgtccagcattaattacacattaattacaaacagacggttttgtgaccgaaattaaatttaatctaaacagataccaaaacaatcatcttcgttttggtaaaagggatcttctttgtcttcttcagcaaaacttgtttcttccttctttgaggatgaagcttcttcttcctgttgtaacatttgtagaacttccttcagatttttagctaagacctcctttgatgtcgatcctgctaaaaatgctgccagatgagacttttggttcaaaaacacagaagtctctggatcagctgccttgaggaattctggatgggattggaaccatagttttacttgttctggatccgctttggatgagtcaaattgtgtccaccattttacaaatgtgtgtctttgtagtgatggatattggtttgtcttttcaatcttgctgtaacgatattgccatgagaatatccatgacagtgcaaagcttgaaaagtatttaagatctgctggaattcgtgattcctgcgaattgtattgtttcttaaattgggaaaatccttgttggaccgtttctgggaatatctctgggattggtccaaagaagtcccaccattgcaaaaaccaattgggaaaattgtaaattgtgttggtcttgaaata

SEQ ID NO: 16212 - DNA, 1082 bp, Glycine max
  Gm_smallRNAprecursor_9045
gagtaggatcaaacggacagataggaagtaagaatgcagtatgattaatgaaatgaaaatataaacttgaaaacagatatcaaggtcacaccggagaccggcttacaaaacccaggttttcataaacaaagaaactgaagcggcggcagagccgcacaggatcggtgaagggagaagagagaaagatgaaaaatagaaatttattgaatctagaaagaagcgcttacaaaaatcttgtttcagagcacctctcttccgaaacctgaaaaaatggctaaatgaaagggtgtctcacaacatacttgaggactccttatatagccaaaaatctaagaccggtagttgccggtagttttgaccgggactatttgactgtttgttacaagacaagtagttttgaccgggactttaatggctacaggacaggtagtattgtccagcattaattacacattaattacaaacagacggttttgtgaccgaaattaaatttaatctaaacagataccaaaacaatcatcttcgttttggtaaaagggatcttctttgtcttcttcagcaaaacttgtttcttccttctttgaggatgaagcttcttcttcctgttgtaacatttgtagaacttccttcagatttttagctaagacctcctttgatgtcgatcctgctaaaaatgctgccagatgagacttttggttcaaaaacacagaagtctctggatcagctgccttgaggaattctggatgggattggaaccatagttttacttgttctggatccgctttggatgagtcaaattgtgtccaccattttacaaatgtgtgtctttgtagtgatggatattggtttgtcttttcaatcttgctgtaacgatattgccatgagaatatccatgacagtgcaaagcttgaaaagtatttaagatctgctggaattcgtgattcctgcgaattgtattgtttcttaaattgggaaaatccttgttggaccgtttctgggaatatctctgggattggtccaaagaagtcccaccattgcaaaaaccaattgggaaaattgtaaattgtgttggtcttgaaata

SEQ ID NO: 16213 - DNA, 1081 bp, Glycine max
  Gm_smallRNAprecursor_9046
agtaggatcaaacggacagataggaagtaagaatgcagtatgattaatgaaatgaaaatataaacttgaaaacagatatcaaggtcacaccggagaccggcttacaaaacccaggttttcataaacaaagaaactgaagcggcggcagagccgcacaggatcggtgaagggagaagagagaaagatgaaaaatagaaatttattgaatctagaaagaagcgcttacaaaaatcttgtttcagagcacctctcttccgaaacctgaaaaaatggctaaatgaaagggtgtctcacaacatacttgaggactccttatatagccaaaaatctaagaccggtagttgccggtagttttgaccgggactatttgactgtttgttacaagacaagtagttttgaccgggactttaatggctacaggacaggtagtattgtccagcattaattacacattaattacaaacagacggttttgtgaccgaaattaaatttaatctaaacagataccaaaacaatcatcttcgttttggtaaaagggatcttctttgtcttcttcagcaaaacttgtttcttccttctttgaggatgaagcttcttcttcctgttgtaacatttgtagaacttccttcagatttttagctaagacctcctttgatgtcgatcctgctaaaaatgctgccagatgagacttttggttcaaaaacacagaagtctctggatcagctgccttgaggaattctggatgggattggaaccatagttttacttgttctggatccgctttggatgagtcaaattgtgtccaccattttacaaatgtgtgtctttgtagtgatggatattggtttgtcttttcaatcttgctgtaacgatattgccatgagaatatccatgacagtgcaaagcttgaaaagtatttaagatctgctggaattcgtgattcctgcgaattgtattgtttcttaaattgggaaaatccttgttggaccgtttctgggaatatctctgggattggtccaaagaagtcccaccattgcaaaaaccaattgggaaaattgtaaattgtgttggtcttgaaata

SEQ ID NO: 16214 - DNA, 1188 bp, Glycine max
  Gm_smallRNAprecursor_9047
caaacggacagataggaagtaagaatgcagtatgattaatgaaatgaaaatataaacttgaaaacagatatcaaggtcacaccggagaccggcttacaaaacccaggttttcataaacaaagaaactgaagcggcggcagagccgcacaggatcggtgaagggagaagagagaaagatgaaaaatagaaatttattgaatctagaaagaagcgcttacaaaaatcttgtttcagagcacctctcttccgaaacctgaaaaaatggctaaatgaaagggtgtctcacaacatacttgaggactccttatatagccaaaaatctaagaccggtagttgccggtagttttgaccgggactatttgactgtttgttacaagacaagtagttttgaccgggactttaatggctacaggacaggtagtattgtccagcattaattacacattaattacaaacagacggttttgtgaccgaaattaaatttaatctaaacagataccaaaacaatcatcttcgttttggtaaaagggatcttctttgtcttcttcagcaaaacttgtttcttccttctttgaggatgaagcttcttcttcctgttgtaacatttgtagaacttccttcagatttttagctaagacctcctttgatgtcgatcctgctaaaaatgctgccagatgagacttttggttcaaaaacacagaagtctctggatcagctgccttgaggaattctggatgggattggaaccatagttttacttgttctggatccgctttggatgagtcaaattgtgtccaccattttacaaatgtgtgtctttgtagtgatggatattggtttgtcttttcaatcttgctgtaacgatattgccatgagaatatccatgacagtgcaaagcttgaaaagtatttaagatctgctggaattcgtgattcctgcgaattgtattgtttcttaaattgggaaaatccttgttggaccgtttctgggaatatctctgggattggtccaaagaagtcccaccattgcaaaaaccaattgggaaaattgtaaattgtgttggtcttgaaatatatcagccatgattgcttgaagcgggtattttggtgccaaaacaccttagtccaagcatcaacgtaatcccaataggtataacctatcggatcaaatggaactgaaaatctcttt

SEQ ID NO: 16215 - DNA, 1032 bp, Glycine max
  Gm_smallRNAprecursor_9048
gaagagagaaagatgaaaaatagaaatttattgaatctagaaagaagcgcttacaaaaatcttgtttcagagcacctctcttccgaaacctgaaaaaatggctaaatgaaagggtgtctcacaacatacttgaggactccttatatagccaaaaatctaagaccggtagttgccggtagttttgaccgggactatttgactgtttgttacaagacaagtagttttgaccgggactttaatggctacaggacaggtagtattgtccagcattaattacacattaattacaaacagacggttttgtgaccgaaattaaatttaatctaaacagataccaaaacaatcatcttcgttttggtaaaagggatcttctttgtcttcttcagcaaaacttgtttcttccttctttgaggatgaagcttcttcttcctgttgtaacatttgtagaacttccttcagatttttagctaagacctcctttgatgtcgatcctgctaaaaatgctgccagatgagacttttggttcaaaaacacagaagtctctggatcagctgccttgaggaattctggatgggattggaaccatagttttacttgttctggatccgctttggatgagtcaaattgtgtccaccattttacaaatgtgtgtctttgtagtgatggatattggtttgtcttttcaatcttgctgtaacgatattgccatgagaatatccatgacagtgcaaagcttgaaaagtatttaagatctgctggaattcgtgattcctgcgaattgtattgtttcttaaattgggaaaatccttgttggaccgtttctgggaatatctctgggattggtccaaagaagtcccaccattgcaaaaaccaattgggaaaattgtaaattgtgttggtcttgaaatatatcagccatgattgcttgaagcgggtattttggtgccaaaacaccttagtccaagcatcaacgtaatcccaataggtataacctatcggatcaaatggaactgaaaatctctttcctttgtt

SEQ ID NO: 16216 - DNA, 1058 bp, Glycine max
  Gm_smallRNAprecursor_9049
aaatttattgaatctagaaagaagcgcttacaaaaatcttgtttcagagcacctctcttccgaaacctgaaaaaatggctaaatgaaagggtgtctcacaacatacttgaggactccttatatagccaaaaatctaagaccggtagttgccggtagttttgaccgggactatttgactgtttgttacaagacaagtagttttgaccgggactttaatggctacaggacaggtagtattgtccagcattaattacacattaattacaaacagacggttttgtgaccgaaattaaatttaatctaaacagataccaaaacaatcatcttcgttttggtaaaagggatcttctttgtcttcttcagcaaaacttgtttcttccttctttgaggatgaagcttcttcttcctgttgtaacatttgtagaacttccttcagatttttagctaagacctcctttgatgtcgatcctgctaaaaatgctgccagatgagacttttggttcaaaaacacagaagtctctggatcagctgccttgaggaattctggatgggattggaaccatagttttacttgttctggatccgctttggatgagtcaaattgtgtccaccattttacaaatgtgtgtctttgtagtgatggatattggtttgtcttttcaatcttgctgtaacgatattgccatgagaatatccatgacagtgcaaagcttgaaaagtatttaagatctgctggaattcgtgattcctgcgaattgtattgtttcttaaattgggaaaatccttgttggaccgtttctgggaatatctctgggattggtccaaagaagtcccaccattgcaaaaaccaattgggaaaattgtaaattgtgttggtcttgaaatatatcagccatgattgcttgaagcgggtattttggtgccaaaacaccttagtccaagcatcaacgtaatcccaataggtataacctatcggatcaaatggaactgaaaatctctttcctttgttcaagtccgaaccaaagtgtctcggttgaagaacttttagtatttggatg

SEQ ID NO: 16217 - DNA, 1131 bp, Glycine max
  Gm_smallRNAprecursor_9050
acaagtagttttgaccgggactttaatggctacaggacaggtagtattgtccagcattaattacacattaattacaaacagacggttttgtgaccgaaattaaatttaatctaaacagataccaaaacaatcatcttcgttttggtaaaagggatcttctttgtcttcttcagcaaaacttgtttcttccttctttgaggatgaagcttcttcttcctgttgtaacatttgtagaacttccttcagatttttagctaagacctcctttgatgtcgatcctgctaaaaatgctgccagatgagacttttggttcaaaaacacagaagtctctggatcagctgccttgaggaattctggatgggattggaaccatagttttacttgttctggatccgctttggatgagtcaaattgtgtccaccattttacaaatgtgtgtctttgtagtgatggatattggtttgtcttttcaatcttgctgtaacgatattgccatgagaatatccatgacagtgcaaagcttgaaaagtatttaagatctgctggaattcgtgattcctgcgaattgtattgtttcttaaattgggaaaatccttgttggaccgtttctgggaatatctctgggattggtccaaagaagtcccaccattgcaaaaaccaattgggaaaattgtaaattgtgttggtcttgaaatatatcagccatgattgcttgaagcgggtattttggtgccaaaacaccttagtccaagcatcaacgtaatcccaataggtataacctatcggatcaaatggaactgaaaatctctttcctttgttcaagtccgaaccaaagtgtctcggttgaagaacttttagtatttggatggttgagtgggtgtttaaggtttggtcttttggatctttgaaatgtttgatagatactgagtttgaatctaccaaaatcaattcataaaatgttcttgtcttcaggatggtggttggtttgtagtgaaatcctggtgggaaggccttggccgtcgccttgaagggatttttgtcccaaaattcaggttccatctgcaaaacagttaacaatttatttttataaatataattgttagtttgtttggtaggtggtgtttgagcttt

SEQ ID NO: 16218 - DNA, 1146 bp, Glycine max
  Gm_smallRNAprecursor_9051
gctacaggacaggtagtattgtccagcattaattacacattaattacaaacagacggttttgtgaccgaaattaaatttaatctaaacagataccaaaacaatcatcttcgttttggtaaaagggatcttctttgtcttcttcagcaaaacttgtttcttccttctttgaggatgaagcttcttcttcctgttgtaacatttgtagaacttccttcagatttttagctaagacctcctttgatgtcgatcctgctaaaaatgctgccagatgagacttttggttcaaaaacacagaagtctctggatcagctgccttgaggaattctggatgggattggaaccatagttttacttgttctggatccgctttggatgagtcaaattgtgtccaccattttacaaatgtgtgtctttgtagtgatggatattggtttgtcttttcaatcttgctgtaacgatattgccatgagaatatccatgacagtgcaaagcttgaaaagtatttaagatctgctggaattcgtgattcctgcgaattgtattgtttcttaaattgggaaaatccttgttggaccgtttctgggaatatctctgggattggtccaaagaagtcccaccattgcaaaaaccaattgggaaaattgtaaattgtgttggtcttgaaatatatcagccatgattgcttgaagcgggtattttggtgccaaaacaccttagtccaagcatcaacgtaatcccaataggtataacctatcggatcaaatggaactgaaaatctctttcctttgttcaagtccgaaccaaagtgtctcggttgaagaacttttagtatttggatggttgagtgggtgtttaaggtttggtcttttggatctttgaaatgtttgatagatactgagtttgaatctaccaaaatcaattcataaaatgttcttgtcttcaggatggtggttggtttgtagtgaaatcctggtgggaaggccttggccgtcgccttgaagggatttttgtcccaaaattcaggttccatctgcaaaacagttaacaatttatttttataaatataattgttagtttgtttggtaggtggtgtttgagctttggctaaaggtagttttcctttagtattggtggctgttttggtc

SEQ ID NO: 16219 - DNA, 1080 bp, Glycine max
  Gm_smallRNAprecursor_9052
ttcagcaaaacttgtttcttccttctttgaggatgaagcttcttcttcctgttgtaacatttgtagaacttccttcagatttttagctaagacctcctttgatgtcgatcctgctaaaaatgctgccagatgagacttttggttcaaaaacacagaagtctctggatcagctgccttgaggaattctggatgggattggaaccatagttttacttgttctggatccgctttggatgagtcaaattgtgtccaccattttacaaatgtgtgtctttgtagtgatggatattggtttgtcttttcaatcttgctgtaacgatattgccatgagaatatccatgacagtgcaaagcttgaaaagtatttaagatctgctggaattcgtgattcctgcgaattgtattgtttcttaaattgggaaaatccttgttggaccgtttctgggaatatctctgggattggtccaaagaagtcccaccattgcaaaaaccaattgggaaaattgtaaattgtgttggtcttgaaatatatcagccatgattgcttgaagcgggtattttggtgccaaaacaccttagtccaagcatcaacgtaatcccaataggtataacctatcggatcaaatggaactgaaaatctctttcctttgttcaagtccgaaccaaagtgtctcggttgaagaacttttagtatttggatggttgagtgggtgtttaaggtttggtcttttggatctttgaaatgtttgatagatactgagtttgaatctaccaaaatcaattcataaaatgttcttgtcttcaggatggtggttggtttgtagtgaaatcctggtgggaaggccttggccgtcgccttgaagggatttttgtcccaaaattcaggttccatctgcaaaacagttaacaatttatttttataaatataattgttagtttgtttggtaggtggtgtttgagctttggctaaaggtagttttcctttagtattggtggctgttttggtcattgacgcattttggatcattgtttgtaaatttgattcagattcatcatcagattctgaggcaatgtctgccca

SEQ ID NO: 16220 - DNA, 1134 bp, Glycine max
  Gm_smallRNAprecursor_9053
acttccttcagatttttagctaagacctcctttgatgtcgatcctgctaaaaatgctgccagatgagacttttggttcaaaaacacagaagtctctggatcagctgccttgaggaattctggatgggattggaaccatagttttacttgttctggatccgctttggatgagtcaaattgtgtccaccattttacaaatgtgtgtctttgtagtgatggatattggtttgtcttttcaatcttgctgtaacgatattgccatgagaatatccatgacagtgcaaagcttgaaaagtatttaagatctgctggaattcgtgattcctgcgaattgtattgtttcttaaattgggaaaatccttgttggaccgtttctgggaatatctctgggattggtccaaagaagtcccaccattgcaaaaaccaattgggaaaattgtaaattgtgttggtcttgaaatatatcagccatgattgcttgaagcgggtattttggtgccaaaacaccttagtccaagcatcaacgtaatcccaataggtataacctatcggatcaaatggaactgaaaatctctttcctttgttcaagtccgaaccaaagtgtctcggttgaagaacttttagtatttggatggttgagtgggtgtttaaggtttggtcttttggatctttgaaatgtttgatagatactgagtttgaatctaccaaaatcaattcataaaatgttcttgtcttcaggatggtggttggtttgtagtgaaatcctggtgggaaggccttggccgtcgccttgaagggatttttgtcccaaaattcaggttccatctgcaaaacagttaacaatttatttttataaatataattgttagtttgtttggtaggtggtgtttgagctttggctaaaggtagttttcctttagtattggtggctgttttggtcattgacgcattttggatcattgtttgtaaatttgattcagattcatcatcagattctgaggcaatgtctgcccaagattttttgattatttttggaaatttggtcagacccatgtcttgaagggcctgaagggtttcaattggccatgcatagtcggccgatgtttgtttggcggttgccggtttgggagattcc

SEQ ID NO: 16221 - DNA, 1140 bp, Glycine max
  Gm_smallRNAprecursor_9054
tttttagctaagacctcctttgatgtcgatcctgctaaaaatgctgccagatgagacttttggttcaaaaacacagaagtctctggatcagctgccttgaggaattctggatgggattggaaccatagttttacttgttctggatccgctttggatgagtcaaattgtgtccaccattttacaaatgtgtgtctttgtagtgatggatattggtttgtcttttcaatcttgctgtaacgatattgccatgagaatatccatgacagtgcaaagcttgaaaagtatttaagatctgctggaattcgtgattcctgcgaattgtattgtttcttaaattgggaaaatccttgttggaccgtttctgggaatatctctgggattggtccaaagaagtcccaccattgcaaaaaccaattgggaaaattgtaaattgtgttggtcttgaaatatatcagccatgattgcttgaagcgggtattttggtgccaaaacaccttagtccaagcatcaacgtaatcccaataggtataacctatcggatcaaatggaactgaaaatctctttcctttgttcaagtccgaaccaaagtgtctcggttgaagaacttttagtatttggatggttgagtgggtgtttaaggtttggtcttttggatctttgaaatgtttgatagatactgagtttgaatctaccaaaatcaattcataaaatgttcttgtcttcaggatggtggttggtttgtagtgaaatcctggtgggaaggccttggccgtcgccttgaagggatttttgtcccaaaattcaggttccatctgcaaaacagttaacaatttatttttataaatataattgttagtttgtttggtaggtggtgtttgagctttggctaaaggtagttttcctttagtattggtggctgttttggtcattgacgcattttggatcattgtttgtaaatttgattcagattcatcatcagattctgaggcaatgtctgcccaagattttttgattatttttggaaatttggtcagacccatgtcttgaagggcctgaagggtttcaattggccatgcatagtcggccgatgtttgtttggcggttgccggtttgggagattcctgagtggatggctcaggt

SEQ ID NO: 16222 - DNA, 1222 bp, Glycine max
  Gm_smallRNAprecursor_9055
ccttgaggaattctggatgggattggaaccatagttttacttgttctggatccgctttggatgagtcaaattgtgtccaccattttacaaatgtgtgtctttgtagtgatggatattggtttgtcttttcaatcttgctgtaacgatattgccatgagaatatccatgacagtgcaaagcttgaaaagtatttaagatctgctggaattcgtgattcctgcgaattgtattgtttcttaaattgggaaaatccttgttggaccgtttctgggaatatctctgggattggtccaaagaagtcccaccattgcaaaaaccaattgggaaaattgtaaattgtgttggtcttgaaatatatcagccatgattgcttgaagcgggtattttggtgccaaaacaccttagtccaagcatcaacgtaatcccaataggtataacctatcggatcaaatggaactgaaaatctctttcctttgttcaagtccgaaccaaagtgtctcggttgaagaacttttagtatttggatggttgagtgggtgtttaaggtttggtcttttggatctttgaaatgtttgatagatactgagtttgaatctaccaaaatcaattcataaaatgttcttgtcttcaggatggtggttggtttgtagtgaaatcctggtgggaaggccttggccgtcgccttgaagggatttttgtcccaaaattcaggttccatctgcaaaacagttaacaatttatttttataaatataattgttagtttgtttggtaggtggtgtttgagctttggctaaaggtagttttcctttagtattggtggctgttttggtcattgacgcattttggatcattgtttgtaaatttgattcagattcatcatcagattctgaggcaatgtctgcccaagattttttgattatttttggaaatttggtcagacccatgtcttgaagggcctgaagggtttcaattggccatgcatagtcggccgatgtttgtttggcggttgccggtttgggagattcctgagtggatggctcaggtttgattgaggcaatctgggttgatgacccttctaaattggttttctgggtagaagacccagcctgggttggtgacccagaagaggtagatgatttcttggtggttggctctggaagagccagcctggctcctttgcctgtactccttcctccccgtagggagattcccgatgcctt

SEQ ID NO: 16223 - DNA, 1193 bp, Glycine max
  Gm_smallRNAprecursor_9056
accatagttttacttgttctggatccgctttggatgagtcaaattgtgtccaccattttacaaatgtgtgtctttgtagtgatggatattggtttgtcttttcaatcttgctgtaacgatattgccatgagaatatccatgacagtgcaaagcttgaaaagtatttaagatctgctggaattcgtgattcctgcgaattgtattgtttcttaaattgggaaaatccttgttggaccgtttctgggaatatctctgggattggtccaaagaagtcccaccattgcaaaaaccaattgggaaaattgtaaattgtgttggtcttgaaatatatcagccatgattgcttgaagcgggtattttggtgccaaaacaccttagtccaagcatcaacgtaatcccaataggtataacctatcggatcaaatggaactgaaaatctctttcctttgttcaagtccgaaccaaagtgtctcggttgaagaacttttagtatttggatggttgagtgggtgtttaaggtttggtcttttggatctttgaaatgtttgatagatactgagtttgaatctaccaaaatcaattcataaaatgttcttgtcttcaggatggtggttggtttgtagtgaaatcctggtgggaaggccttggccgtcgccttgaagggatttttgtcccaaaattcaggttccatctgcaaaacagttaacaatttatttttataaatataattgttagtttgtttggtaggtggtgtttgagctttggctaaaggtagttttcctttagtattggtggctgttttggtcattgacgcattttggatcattgtttgtaaatttgattcagattcatcatcagattctgaggcaatgtctgcccaagattttttgattatttttggaaatttggtcagacccatgtcttgaagggcctgaagggtttcaattggccatgcatagtcggccgatgtttgtttggcggttgccggtttgggagattcctgagtggatggctcaggtttgattgaggcaatctgggttgatgacccttctaaattggttttctgggtagaagacccagcctgggttggtgacccagaagaggtagatgatttcttggtggttggctctggaagagccagcctggctcctttgcctgtactccttcctccccgtagggagattcccgatgcc

SEQ ID NO: 16224 - DNA, 1195 bp, Glycine max
  Gm_smallRNAprecursor_9057
accatagttttacttgttctggatccgctttggatgagtcaaattgtgtccaccattttacaaatgtgtgtctttgtagtgatggatattggtttgtcttttcaatcttgctgtaacgatattgccatgagaatatccatgacagtgcaaagcttgaaaagtatttaagatctgctggaattcgtgattcctgcgaattgtattgtttcttaaattgggaaaatccttgttggaccgtttctgggaatatctctgggattggtccaaagaagtcccaccattgcaaaaaccaattgggaaaattgtaaattgtgttggtcttgaaatatatcagccatgattgcttgaagcgggtattttggtgccaaaacaccttagtccaagcatcaacgtaatcccaataggtataacctatcggatcaaatggaactgaaaatctctttcctttgttcaagtccgaaccaaagtgtctcggttgaagaacttttagtatttggatggttgagtgggtgtttaaggtttggtcttttggatctttgaaatgtttgatagatactgagtttgaatctaccaaaatcaattcataaaatgttcttgtcttcaggatggtggttggtttgtagtgaaatcctggtgggaaggccttggccgtcgccttgaagggatttttgtcccaaaattcaggttccatctgcaaaacagttaacaatttatttttataaatataattgttagtttgtttggtaggtggtgtttgagctttggctaaaggtagttttcctttagtattggtggctgttttggtcattgacgcattttggatcattgtttgtaaatttgattcagattcatcatcagattctgaggcaatgtctgcccaagattttttgattatttttggaaatttggtcagacccatgtcttgaagggcctgaagggtttcaattggccatgcatagtcggccgatgtttgtttggcggttgccggtttgggagattcctgagtggatggctcaggtttgattgaggcaatctgggttgatgacccttctaaattggttttctgggtagaagacccagcctgggttggtgacccagaagaggtagatgatttcttggtggttggctctggaagagccagcctggctcctttgcctgtactccttcctccccgtagggagattcccgatgcctt

SEQ ID NO: 16225 - DNA, 1058 bp, Glycine max
  Gm_smallRNAprecursor_9058
tacttgttctggatccgctttggatgagtcaaattgtgtccaccattttacaaatgtgtgtctttgtagtgatggatattggtttgtcttttcaatcttgctgtaacgatattgccatgagaatatccatgacagtgcaaagcttgaaaagtatttaagatctgctggaattcgtgattcctgcgaattgtattgtttcttaaattgggaaaatccttgttggaccgtttctgggaatatctctgggattggtccaaagaagtcccaccattgcaaaaaccaattgggaaaattgtaaattgtgttggtcttgaaatatatcagccatgattgcttgaagcgggtattttggtgccaaaacaccttagtccaagcatcaacgtaatcccaataggtataacctatcggatcaaatggaactgaaaatctctttcctttgttcaagtccgaaccaaagtgtctcggttgaagaacttttagtatttggatggttgagtgggtgtttaaggtttggtcttttggatctttgaaatgtttgatagatactgagtttgaatctaccaaaatcaattcataaaatgttcttgtcttcaggatggtggttggtttgtagtgaaatcctggtgggaaggccttggccgtcgccttgaagggatttttgtcccaaaattcaggttccatctgcaaaacagttaacaatttatttttataaatataattgttagtttgtttggtaggtggtgtttgagctttggctaaaggtagttttcctttagtattggtggctgttttggtcattgacgcattttggatcattgtttgtaaatttgattcagattcatcatcagattctgaggcaatgtctgcccaagattttttgattatttttggaaatttggtcagacccatgtcttgaagggcctgaagggtttcaattggccatgcatagtcggccgatgtttgtttggcggttgccggtttgggagattcctgagtggatggctcaggtttgattgaggcaatctgggttgatgacccttctaaattggttttctggg

SEQ ID NO: 16226 - DNA, 1176 bp, Glycine max
  Gm_smallRNAprecursor_9059
tacttgttctggatccgctttggatgagtcaaattgtgtccaccattttacaaatgtgtgtctttgtagtgatggatattggtttgtcttttcaatcttgctgtaacgatattgccatgagaatatccatgacagtgcaaagcttgaaaagtatttaagatctgctggaattcgtgattcctgcgaattgtattgtttcttaaattgggaaaatccttgttggaccgtttctgggaatatctctgggattggtccaaagaagtcccaccattgcaaaaaccaattgggaaaattgtaaattgtgttggtcttgaaatatatcagccatgattgcttgaagcgggtattttggtgccaaaacaccttagtccaagcatcaacgtaatcccaataggtataacctatcggatcaaatggaactgaaaatctctttcctttgttcaagtccgaaccaaagtgtctcggttgaagaacttttagtatttggatggttgagtgggtgtttaaggtttggtcttttggatctttgaaatgtttgatagatactgagtttgaatctaccaaaatcaattcataaaatgttcttgtcttcaggatggtggttggtttgtagtgaaatcctggtgggaaggccttggccgtcgccttgaagggatttttgtcccaaaattcaggttccatctgcaaaacagttaacaatttatttttataaatataattgttagtttgtttggtaggtggtgtttgagctttggctaaaggtagttttcctttagtattggtggctgttttggtcattgacgcattttggatcattgtttgtaaatttgattcagattcatcatcagattctgaggcaatgtctgcccaagattttttgattatttttggaaatttggtcagacccatgtcttgaagggcctgaagggtttcaattggccatgcatagtcggccgatgtttgtttggcggttgccggtttgggagattcctgagtggatggctcaggtttgattgaggcaatctgggttgatgacccttctaaattggttttctgggtagaagacccagcctgggttggtgacccagaagaggtagatgatttcttggtggttggctctggaagagccagcctggctcctttgcctgtactccttcctccccgtagggagattcc

SEQ ID NO: 16227 - DNA, 1183 bp, Glycine max
  Gm_smallRNAprecursor_9060
tacttgttctggatccgctttggatgagtcaaattgtgtccaccattttacaaatgtgtgtctttgtagtgatggatattggtttgtcttttcaatcttgctgtaacgatattgccatgagaatatccatgacagtgcaaagcttgaaaagtatttaagatctgctggaattcgtgattcctgcgaattgtattgtttcttaaattgggaaaatccttgttggaccgtttctgggaatatctctgggattggtccaaagaagtcccaccattgcaaaaaccaattgggaaaattgtaaattgtgttggtcttgaaatatatcagccatgattgcttgaagcgggtattttggtgccaaaacaccttagtccaagcatcaacgtaatcccaataggtataacctatcggatcaaatggaactgaaaatctctttcctttgttcaagtccgaaccaaagtgtctcggttgaagaacttttagtatttggatggttgagtgggtgtttaaggtttggtcttttggatctttgaaatgtttgatagatactgagtttgaatctaccaaaatcaattcataaaatgttcttgtcttcaggatggtggttggtttgtagtgaaatcctggtgggaaggccttggccgtcgccttgaagggatttttgtcccaaaattcaggttccatctgcaaaacagttaacaatttatttttataaatataattgttagtttgtttggtaggtggtgtttgagctttggctaaaggtagttttcctttagtattggtggctgttttggtcattgacgcattttggatcattgtttgtaaatttgattcagattcatcatcagattctgaggcaatgtctgcccaagattttttgattatttttggaaatttggtcagacccatgtcttgaagggcctgaagggtttcaattggccatgcatagtcggccgatgtttgtttggcggttgccggtttgggagattcctgagtggatggctcaggtttgattgaggcaatctgggttgatgacccttctaaattggttttctgggtagaagacccagcctgggttggtgacccagaagaggtagatgatttcttggtggttggctctggaagagccagcctggctcctttgcctgtactccttcctccccgtagggagattcccgatgcc

SEQ ID NO: 16228 - DNA, 1159 bp, Glycine max
  Gm_smallRNAprecursor_9061
ctggatccgctttggatgagtcaaattgtgtccaccattttacaaatgtgtgtctttgtagtgatggatattggtttgtcttttcaatcttgctgtaacgatattgccatgagaatatccatgacagtgcaaagcttgaaaagtatttaagatctgctggaattcgtgattcctgcgaattgtattgtttcttaaattgggaaaatccttgttggaccgtttctgggaatatctctgggattggtccaaagaagtcccaccattgcaaaaaccaattgggaaaattgtaaattgtgttggtcttgaaatatatcagccatgattgcttgaagcgggtattttggtgccaaaacaccttagtccaagcatcaacgtaatcccaataggtataacctatcggatcaaatggaactgaaaatctctttcctttgttcaagtccgaaccaaagtgtctcggttgaagaacttttagtatttggatggttgagtgggtgtttaaggtttggtcttttggatctttgaaatgtttgatagatactgagtttgaatctaccaaaatcaattcataaaatgttcttgtcttcaggatggtggttggtttgtagtgaaatcctggtgggaaggccttggccgtcgccttgaagggatttttgtcccaaaattcaggttccatctgcaaaacagttaacaatttatttttataaatataattgttagtttgtttggtaggtggtgtttgagctttggctaaaggtagttttcctttagtattggtggctgttttggtcattgacgcattttggatcattgtttgtaaatttgattcagattcatcatcagattctgaggcaatgtctgcccaagattttttgattatttttggaaatttggtcagacccatgtcttgaagggcctgaagggtttcaattggccatgcatagtcggccgatgtttgtttggcggttgccggtttgggagattcctgagtggatggctcaggtttgattgaggcaatctgggttgatgacccttctaaattggttttctgggtagaagacccagcctgggttggtgacccagaagaggtagatgatttcttggtggttggctctggaagagccagcctggctcctttgcctgtactccttcctccccgtag

SEQ ID NO: 16229 - DNA, 1098 bp, Glycine max
  Gm_smallRNAprecursor_9062
gtgtctttgtagtgatggatattggtttgtcttttcaatcttgctgtaacgatattgccatgagaatatccatgacagtgcaaagcttgaaaagtatttaagatctgctggaattcgtgattcctgcgaattgtattgtttcttaaattgggaaaatccttgttggaccgtttctgggaatatctctgggattggtccaaagaagtcccaccattgcaaaaaccaattgggaaaattgtaaattgtgttggtcttgaaatatatcagccatgattgcttgaagcgggtattttggtgccaaaacaccttagtccaagcatcaacgtaatcccaataggtataacctatcggatcaaatggaactgaaaatctctttcctttgttcaagtccgaaccaaagtgtctcggttgaagaacttttagtatttggatggttgagtgggtgtttaaggtttggtcttttggatctttgaaatgtttgatagatactgagtttgaatctaccaaaatcaattcataaaatgttcttgtcttcaggatggtggttggtttgtagtgaaatcctggtgggaaggccttggccgtcgccttgaagggatttttgtcccaaaattcaggttccatctgcaaaacagttaacaatttatttttataaatataattgttagtttgtttggtaggtggtgtttgagctttggctaaaggtagttttcctttagtattggtggctgttttggtcattgacgcattttggatcattgtttgtaaatttgattcagattcatcatcagattctgaggcaatgtctgcccaagattttttgattatttttggaaatttggtcagacccatgtcttgaagggcctgaagggtttcaattggccatgcatagtcggccgatgtttgtttggcggttgccggtttgggagattcctgagtggatggctcaggtttgattgaggcaatctgggttgatgacccttctaaattggttttctgggtagaagacccagcctgggttggtgacccagaagaggtagatgatttcttggtggttggctctggaagagccagcctggctcctttgcctgtactcct

SEQ ID NO: 16230 - DNA, 1090 bp, Glycine max
  Gm_smallRNAprecursor_9063
gcgaattgtattgtttcttaaattgggaaaatccttgttggaccgtttctgggaatatctctgggattggtccaaagaagtcccaccattgcaaaaaccaattgggaaaattgtaaattgtgttggtcttgaaatatatcagccatgattgcttgaagcgggtattttggtgccaaaacaccttagtccaagcatcaacgtaatcccaataggtataacctatcggatcaaatggaactgaaaatctctttcctttgttcaagtccgaaccaaagtgtctcggttgaagaacttttagtatttggatggttgagtgggtgtttaaggtttggtcttttggatctttgaaatgtttgatagatactgagtttgaatctaccaaaatcaattcataaaatgttcttgtcttcaggatggtggttggtttgtagtgaaatcctggtgggaaggccttggccgtcgccttgaagggatttttgtcccaaaattcaggttccatctgcaaaacagttaacaatttatttttataaatataattgttagtttgtttggtaggtggtgtttgagctttggctaaaggtagttttcctttagtattggtggctgttttggtcattgacgcattttggatcattgtttgtaaatttgattcagattcatcatcagattctgaggcaatgtctgcccaagattttttgattatttttggaaatttggtcagacccatgtcttgaagggcctgaagggtttcaattggccatgcatagtcggccgatgtttgtttggcggttgccggtttgggagattcctgagtggatggctcaggtttgattgaggcaatctgggttgatgacccttctaaattggttttctgggtagaagacccagcctgggttggtgacccagaagaggtagatgatttcttggtggttggctctggaagagccagcctggctcctttgcctgtactccttcctccccgtagggagattcccgatgccttaggaggcattaccacttttctgtaagaattcacgggtaaggtagtcaggtagtgaatttgaggtgcccttgatgtattctatgtcaa

SEQ ID NO: 16231 - DNA, 1141 bp, Glycine max
  Gm_smallRNAprecursor_9064
ttgacgcattttggatcattgtttgtaaatttgattcagattcatcatcagattctgaggcaatgtctgcccaagattttttgattatttttggaaatttggtcagacccatgtcttgaagggcctgaagggtttcaattggccatgcatagtcggccgatgtttgtttggcggttgccggtttgggagattcctgagtggatggctcaggtttgattgaggcaatctgggttgatgacccttctaaattggttttctgggtagaagacccagcctgggttggtgacccagaagaggtagatgatttcttggtggttggctctggaagagccagcctggctcctttgcctgtactccttcctccccgtagggagattcccgatgccttaggaggcattaccacttttctgtaagaattcacgggtaaggtagtcaggtagtgaatttgaggtgcccttgatgtattctatgtcaaaatcaaagacacttaaaattgcttgccatcgtgcaaaaatttgttttgaggcaaggtttttaacatctttttgtaaaatatctttggctgatttacaatcaaccctgattaaaaatttttggtttaataaatccgattgaaatttggaaatgcacaaaacaattgctaaaacctcttttttaacagttgaatattttaattgtgcaggattccaatgttttgatgtatatgcaatgacatgatcttggccatggactctttgtttgaggatgccaccataacctatgtctgaagcatcagtttcgacaattttaaatgcctgtggaataggaagatacagacatttaatggattggactttgactttgacttctttaaccgtttgtgtatggaggtcagaccaaggaggcggatttttcttcagcctatcatgtaatggcttgacaatattatttaaataggggacaaattctcctacgtaatttagacaacctagaaatctttgtaactaggttttgtctaagatttggttggggaatttgctagcaaactctattgatctttcaattggaatgattgtaccttgatatatattgtgaccaaggaatcgaattcgagtttggaaaagattgatttttgatttggagactgccaaaccattttgtt

SEQ ID NO: 16232 - DNA, 1049 bp, Glycine max
  Gm_smallRNAprecursor_9065
ggaaatttggtcagacccatgtcttgaagggcctgaagggtttcaattggccatgcatagtcggccgatgtttgtttggcggttgccggtttgggagattcctgagtggatggctcaggtttgattgaggcaatctgggttgatgacccttctaaattggttttctgggtagaagacccagcctgggttggtgacccagaagaggtagatgatttcttggtggttggctctggaagagccagcctggctcctttgcctgtactccttcctccccgtagggagattcccgatgccttaggaggcattaccacttttctgtaagaattcacgggtaaggtagtcaggtagtgaatttgaggtgcccttgatgtattctatgtcaaaatcaaagacacttaaaattgcttgccatcgtgcaaaaatttgttttgaggcaaggtttttaacatctttttgtaaaatatctttggctgatttacaatcaaccctgattaaaaatttttggtttaataaatccgattgaaatttggaaatgcacaaaacaattgctaaaacctcttttttaacagttgaatattttaattgtgcaggattccaatgttttgatgtatatgcaatgacatgatcttggccatggactctttgtttgaggatgccaccataacctatgtctgaagcatcagtttcgacaattttaaatgcctgtggaataggaagatacagacatttaatggattggactttgactttgacttctttaaccgtttgtgtatggaggtcagaccaaggaggcggatttttcttcagcctatcatgtaatggcttgacaatattatttaaataggggacaaattctcctacgtaatttagacaacctagaaatctttgtaactaggttttgtctaagatttggttggggaatttgctagcaaactctattgatctttcaattggaatgattgtaccttgatatatattgtgaccaaggaatcgaattcgagtttggaaaagattgatttttgatttggagactgccaaaccattttgtt

SEQ ID NO: 16233 - DNA, 1113 bp, Glycine max
  Gm_smallRNAprecursor_9066
ggaaatttggtcagacccatgtcttgaagggcctgaagggtttcaattggccatgcatagtcggccgatgtttgtttggcggttgccggtttgggagattcctgagtggatggctcaggtttgattgaggcaatctgggttgatgacccttctaaattggttttctgggtagaagacccagcctgggttggtgacccagaagaggtagatgatttcttggtggttggctctggaagagccagcctggctcctttgcctgtactccttcctccccgtagggagattcccgatgccttaggaggcattaccacttttctgtaagaattcacgggtaaggtagtcaggtagtgaatttgaggtgcccttgatgtattctatgtcaaaatcaaagacacttaaaattgcttgccatcgtgcaaaaatttgttttgaggcaaggtttttaacatctttttgtaaaatatctttggctgatttacaatcaaccctgattaaaaatttttggtttaataaatccgattgaaatttggaaatgcacaaaacaattgctaaaacctcttttttaacagttgaatattttaattgtgcaggattccaatgttttgatgtatatgcaatgacatgatcttggccatggactctttgtttgaggatgccaccataacctatgtctgaagcatcagtttcgacaattttaaatgcctgtggaataggaagatacagacatttaatggattggactttgactttgacttctttaaccgtttgtgtatggaggtcagaccaaggaggcggatttttcttcagcctatcatgtaatggcttgacaatattatttaaataggggacaaattctcctacgtaatttagacaacctagaaatctttgtaactaggttttgtctaagatttggttggggaatttgctagcaaactctattgatctttcaattggaatgattgtaccttgatatatattgtgaccaaggaatcgaattcgagtttggaaaagattgatttttgatttggagactgccaaaccattttgtttgatgatatgtatgaaggtttggagatgtttgaaatgttggtcaatgttttgggaaaagattaa

SEQ ID NO: 16234 - DNA, 1113 bp, Glycine max; identical to SEQ ID NO: 16233
  Gm_smallRNAprecursor_9067

SEQ ID NO: 16235 - DNA, 1114 bp, Glycine max
  Gm_smallRNAprecursor_9068
ggaaatttggtcagacccatgtcttgaagggcctgaagggtttcaattggccatgcatagtcggccgatgtttgtttggcggttgccggtttgggagattcctgagtggatggctcaggtttgattgaggcaatctgggttgatgacccttctaaattggttttctgggtagaagacccagcctgggttggtgacccagaagaggtagatgatttcttggtggttggctctggaagagccagcctggctcctttgcctgtactccttcctccccgtagggagattcccgatgccttaggaggcattaccacttttctgtaagaattcacgggtaaggtagtcaggtagtgaatttgaggtgcccttgatgtattctatgtcaaaatcaaagacacttaaaattgcttgccatcgtgcaaaaatttgttttgaggcaaggtttttaacatctttttgtaaaatatctttggctgatttacaatcaaccctgattaaaaatttttggtttaataaatccgattgaaatttggaaatgcacaaaacaattgctaaaacctcttttttaacagttgaatattttaattgtgcaggattccaatgttttgatgtatatgcaatgacatgatcttggccatggactctttgtttgaggatgccaccataacctatgtctgaagcatcagtttcgacaattttaaatgcctgtggaataggaagatacagacatttaatggattggactttgactttgacttctttaaccgtttgtgtatggaggtcagaccaaggaggcggatttttcttcagcctatcatgtaatggcttgacaatattatttaaataggggacaaattctcctacgtaatttagacaacctagaaatctttgtaactaggttttgtctaagatttggttggggaatttgctagcaaactctattgatctttcaattggaatgattgtaccttgatatatattgtgaccaaggaatcgaattcgagtttggaaaagattgatttttgatttggagactgccaaaccattttgtttgatgatatgtatgaaggtttggagatgtttgaaatgttggtcaatgttttgggaaaagattaaa

SEQ ID NO: 16236 - DNA, 1133 bp, Glycine max
  Gm_smallRNAprecursor_9069
ggaaatttggtcagacccatgtcttgaagggcctgaagggtttcaattggccatgcatagtcggccgatgtttgtttggcggttgccggtttgggagattcctgagtggatggctcaggtttgattgaggcaatctgggttgatgacccttctaaattggttttctgggtagaagacccagcctgggttggtgacccagaagaggtagatgatttcttggtggttggctctggaagagccagcctggctcctttgcctgtactccttcctccccgtagggagattcccgatgccttaggaggcattaccacttttctgtaagaattcacgggtaaggtagtcaggtagtgaatttgaggtgcccttgatgtattctatgtcaaaatcaaagacacttaaaattgcttgccatcgtgcaaaaatttgttttgaggcaaggtttttaacatctttttgtaaaatatctttggctgatttacaatcaaccctgattaaaaatttttggtttaataaatccgattgaaatttggaaatgcacaaaacaattgctaaaacctcttttttaacagttgaatattttaattgtgcaggattccaatgttttgatgtatatgcaatgacatgatcttggccatggactctttgtttgaggatgccaccataacctatgtctgaagcatcagtttcgacaattttaaatgcctgtggaataggaagatacagacatttaatggattggactttgactttgacttctttaaccgtttgtgtatggaggtcagaccaaggaggcggatttttcttcagcctatcatgtaatggcttgacaatattatttaaataggggacaaattctcctacgtaatttagacaacctagaaatctttgtaactaggttttgtctaagatttggttggggaatttgctagcaaactctattgatctttcaattggaatgattgtaccttgatatatattgtgaccaaggaatcgaattcgagtttggaaaagattgatttttgatttggagactgccaaaccattttgtttgatgatatgtatgaaggtttggagatgtttgaaatgttggtcaatgttttgggaaaagattaaaacatcatctatgtggtacc

SEQ ID NO: 16237 - DNA, 1035 bp, Glycine max
  Gm_smallRNAprecursor_9070
gcggttgccggtttgggagattcctgagtggatggctcaggtttgattgaggcaatctgggttgatgacccttctaaattggttttctgggtagaagacccagcctgggttggtgacccagaagaggtagatgatttcttggtggttggctctggaagagccagcctggctcctttgcctgtactccttcctccccgtagggagattcccgatgccttaggaggcattaccacttttctgtaagaattcacgggtaaggtagtcaggtagtgaatttgaggtgcccttgatgtattctatgtcaaaatcaaagacacttaaaattgcttgccatcgtgcaaaaatttgttttgaggcaaggtttttaacatctttttgtaaaatatctttggctgatttacaatcaaccctgattaaaaatttttggtttaataaatccgattgaaatttggaaatgcacaaaacaattgctaaaacctcttttttaacagttgaatattttaattgtgcaggattccaatgttttgatgtatatgcaatgacatgatcttggccatggactctttgtttgaggatgccaccataacctatgtctgaagcatcagtttcgacaattttaaatgcctgtggaataggaagatacagacatttaatggattggactttgactttgacttctttaaccgtttgtgtatggaggtcagaccaaggaggcggatttttcttcagcctatcatgtaatggcttgacaatattatttaaataggggacaaattctcctacgtaatttagacaacctagaaatctttgtaactaggttttgtctaagatttggttggggaatttgctagcaaactctattgatctttcaattggaatgattgtaccttgatatatattgtgaccaaggaatcgaattcgagtttggaaaagattgatttttgatttggagactgccaaaccattttgtttgatgatatgtatgaaggtttggagatgtttgaaatgttggtcaatgttttgggaaaagattaa

SEQ ID NO: 16238 - DNA, 927 bp, Glycine max
  Gm_smallRNAprecursor_9071
agatgatttcttggtggttggctctggaagagccagcctggctcctttgcctgtactccttcctccccgtagggagattcccgatgccttaggaggcattaccacttttctgtaagaattcacgggtaaggtagtcaggtagtgaatttgaggtgcccttgatgtattctatgtcaaaatcaaagacacttaaaattgcttgccatcgtgcaaaaatttgttttgaggcaaggtttttaacatctttttgtaaaatatctttggctgatttacaatcaaccctgattaaaaatttttggtttaataaatccgattgaaatttggaaatgcacaaaacaattgctaaaacctcttttttaacagttgaatattttaattgtgcaggattccaatgttttgatgtatatgcaatgacatgatcttggccatggactctttgtttgaggatgccaccataacctatgtctgaagcatcagtttcgacaattttaaatgcctgtggaataggaagatacagacatttaatggattggactttgactttgacttctttaaccgtttgtgtatggaggtcagaccaaggaggcggatttttcttcagcctatcatgtaatggcttgacaatattatttaaataggggacaaattctcctacgtaatttagacaacctagaaatctttgtaactaggttttgtctaagatttggttggggaatttgctagcaaactctattgatctttcaattggaatgattgtaccttgatatatattgtgaccaaggaatcgaattcgagtttggaaaagattgatttttgatttggagactgccaaaccattttgtttgatgatatgtatgaaggtttggagatgtttgaaatgttggtcaatgttttgggaaaagattaaaacatcatctatgtggtacc

SEQ ID NO: 16239 - DNA, 926 bp, Glycine max
  Gm_smallRNAprecursor_9072
gatgatttcttggtggttggctctggaagagccagcctggctcctttgcctgtactccttcctccccgtagggagattcccgatgccttaggaggcattaccacttttctgtaagaattcacgggtaaggtagtcaggtagtgaatttgaggtgcccttgatgtattctatgtcaaaatcaaagacacttaaaattgcttgccatcgtgcaaaaatttgttttgaggcaaggtttttaacatctttttgtaaaatatctttggctgatttacaatcaaccctgattaaaaatttttggtttaataaatccgattgaaatttggaaatgcacaaaacaattgctaaaacctcttttttaacagttgaatattttaattgtgcaggattccaatgttttgatgtatatgcaatgacatgatcttggccatggactctttgtttgaggatgccaccataacctatgtctgaagcatcagtttcgacaattttaaatgcctgtggaataggaagatacagacatttaatggattggactttgactttgacttctttaaccgtttgtgtatggaggtcagaccaaggaggcggatttttcttcagcctatcatgtaatggcttgacaatattatttaaataggggacaaattctcctacgtaatttagacaacctagaaatctttgtaactaggttttgtctaagatttggttggggaatttgctagcaaactctattgatctttcaattggaatgattgtaccttgatatatattgtgaccaaggaatcgaattcgagtttggaaaagattgatttttgatttggagactgccaaaccattttgtttgatgatatgtatgaaggtttggagatgtttgaaatgttggtcaatgttttgggaaaagattaaaacatcatctatgtggtacc

SEQ ID NO: 16240 - DNA, 684 bp, Glycine max
  Gm_smallRNAprecursor_9073
ctttttgtaaaatatctttggctgatttacaatcaaccctgattaaaaatttttggtttaataaatccgattgaaatttggaaatgcacaaaacaattgctaaaacctcttttttaacagttgaatattttaattgtgcaggattccaatgttttgatgtatatgcaatgacatgatcttggccatggactctttgtttgaggatgccaccataacctatgtctgaagcatcagtttcgacaattttaaatgcctgtggaataggaagatacagacatttaatggattggactttgactttgacttctttaaccgtttgtgtatggaggtcagaccaaggaggcggatttttcttcagcctatcatgtaatggcttgacaatattatttaaataggggacaaattctcctacgtaatttagacaacctagaaatctttgtaactaggttttgtctaagatttggttggggaatttgctagcaaactctattgatctttcaattggaatgattgtaccttgatatatattgtgaccaaggaatcgaattcgagtttggaaaagattgatttttgatttggagactgccaaaccattttgtttgatgatatgtatgaaggtttggagatgtttgaaatgttggtcaatgttttgggaaaagattaaaacatcatctatgtggtacc

SEQ ID NO: 16241 - DNA, 1182 bp, Glycine max
  Gm_smallRNAprecursor_9074
tgtttcagagcacctctcttccgaaacctgaaaaaatggctaaatgaaagggtgcctcacaacatacttgaggactccttatatagccaaaaatctaagaccggtagttgccggtagttttgaccgggactatttgactgtttgttacaagacaagtagttttgaccgggactttaatggctacaggacaggtagtattgtccatcattaattacacattaattacaaacaaacggttttctgaccgaaattaaatttaatctaaacagataccaaaacaatcatcttcgttttggtaaaagggatcttcttcgtcttctttggcagaacttgtttcttccttctttgaggatgaaacttcttcttcttgttgtaacatttgtagaacttccttcagatttttagctaagacctcctttgatgtcgatcctgctaaaaatgctgccagatgagacttttggttcaaaaacacagaagtctctggatcagctgccttgaggaattctggatgggattggaaccatagttttacttgttctggatccgctttggatgagtcaaattgtgtccaccattttacaaatgcgtgtctttgtagtgatggatattggtttgtcttttcagtcttgctgtaacgatattgccatgagaatatccatgacagtgcaaagcttgaaaagtatttaagatctgctggaattcgtgattcctgcgaattgtattgtttcttaaattgggaaaatccttgttggaccgtttctgggaatatctctgggattggtccaaagaagtcccaccattgcaaaaaccaattgagaaaattgtaaattgtgttggtcttgaaatatatcagccatgaatgcttgaagcgggtattttggtgccaaaacaccttagtccaagcatcaacgtaatcccaataggtataacctaccggatcaaatggaactgaaaatctctttcctttgttcaagtccgaaccaaagtgtctcggttgaagaacttttagtatttggatggttgagtgggtgtttaaggtttggtcttttggatctttgaagtgtttgatagatactgagtttgaatctaccaaaatcaattcataaaaagttcttgtcttcaggatggtggttggtttgtagtgaaatcctggtgggaaagccttggctgtcgccttgaagg

SEQ ID NO: 16242 - DNA, 1031 bp, Glycine max
  Gm_smallRNAprecursor_9075
acaagtagttttgaccgggactttaatggctacaggacaggtagtattgtccatcattaattacacattaattacaaacaaacggttttctgaccgaaattaaatttaatctaaacagataccaaaacaatcatcttcgttttggtaaaagggatcttcttcgtcttctttggcagaacttgtttcttccttctttgaggatgaaacttcttcttcttgttgtaacatttgtagaacttccttcagatttttagctaagacctcctttgatgtcgatcctgctaaaaatgctgccagatgagacttttggttcaaaaacacagaagtctctggatcagctgccttgaggaattctggatgggattggaaccatagttttacttgttctggatccgctttggatgagtcaaattgtgtccaccattttacaaatgcgtgtctttgtagtgatggatattggtttgtcttttcagtcttgctgtaacgatattgccatgagaatatccatgacagtgcaaagcttgaaaagtatttaagatctgctggaattcgtgattcctgcgaattgtattgtttcttaaattgggaaaatccttgttggaccgtttctgggaatatctctgggattggtccaaagaagtcccaccattgcaaaaaccaattgagaaaattgtaaattgtgttggtcttgaaatatatcagccatgaatgcttgaagcgggtattttggtgccaaaacaccttagtccaagcatcaacgtaatcccaataggtataacctaccggatcaaatggaactgaaaatctctttcctttgttcaagtccgaaccaaagtgtctcggttgaagaacttttagtatttggatggttgagtgggtgtttaaggtttggtcttttggatctttgaagtgtttgatagatactgagtttgaatctaccaaaatcaattcataaaaagttcttgtcttcaggatggtggttggtttgtagtgaaatcctggtgggaaagccttggctgtcgccttgaagg

SEQ ID NO: 16243 - DNA, 1031 bp, Glycine max; identical to SEQ ID NO: 16242
  Gm_smallRNAprecursor_9076

SEQ ID NO: 16244 - DNA, 1114 bp, Glycine max
  Gm_smallRNAprecursor_9077
ggactttaatggctacaggacaggtagtattgtccatcattaattacacattaattacaaacaaacggttttctgaccgaaattaaatttaatctaaacagataccaaaacaatcatcttcgttttggtaaaagggatcttcttcgtcttctttggcagaacttgtttcttccttctttgaggatgaaacttcttcttcttgttgtaacatttgtagaacttccttcagatttttagctaagacctcctttgatgtcgatcctgctaaaaatgctgccagatgagacttttggttcaaaaacacagaagtctctggatcagctgccttgaggaattctggatgggattggaaccatagttttacttgttctggatccgctttggatgagtcaaattgtgtccaccattttacaaatgcgtgtctttgtagtgatggatattggtttgtcttttcagtcttgctgtaacgatattgccatgagaatatccatgacagtgcaaagcttgaaaagtatttaagatctgctggaattcgtgattcctgcgaattgtattgtttcttaaattgggaaaatccttgttggaccgtttctgggaatatctctgggattggtccaaagaagtcccaccattgcaaaaaccaattgagaaaattgtaaattgtgttggtcttgaaatatatcagccatgaatgcttgaagcgggtattttggtgccaaaacaccttagtccaagcatcaacgtaatcccaataggtataacctaccggatcaaatggaactgaaaatctctttcctttgttcaagtccgaaccaaagtgtctcggttgaagaacttttagtatttggatggttgagtgggtgtttaaggtttggtcttttggatctttgaagtgtttgatagatactgagtttgaatctaccaaaatcaattcataaaaagttcttgtcttcaggatggtggttggtttgtagtgaaatcctggtgggaaagccttggctgtcgccttgaagggatttttgtcccaaaattcaggttccatctgcaaaacagttaacaatttatttttataaatataattgttagtttgtttggtaggtggtgtttgagcttt

SEQ ID NO: 16245 - DNA, 1146 bp, Glycine max
  Gm_smallRNAprecursor_9078
tacaggacaggtagtattgtccatcattaattacacattaattacaaacaaacggttttctgaccgaaattaaatttaatctaaacagataccaaaacaatcatcttcgttttggtaaaagggatcttcttcgtcttctttggcagaacttgtttcttccttctttgaggatgaaacttcttcttcttgttgtaacatttgtagaacttccttcagatttttagctaagacctcctttgatgtcgatcctgctaaaaatgctgccagatgagacttttggttcaaaaacacagaagtctctggatcagctgccttgaggaattctggatgggattggaaccatagttttacttgttctggatccgctttggatgagtcaaattgtgtccaccattttacaaatgcgtgtctttgtagtgatggatattggtttgtcttttcagtcttgctgtaacgatattgccatgagaatatccatgacagtgcaaagcttgaaaagtatttaagatctgctggaattcgtgattcctgcgaattgtattgtttcttaaattgggaaaatccttgttggaccgtttctgggaatatctctgggattggtccaaagaagtcccaccattgcaaaaaccaattgagaaaattgtaaattgtgttggtcttgaaatatatcagccatgaatgcttgaagcgggtattttggtgccaaaacaccttagtccaagcatcaacgtaatcccaataggtataacctaccggatcaaatggaactgaaaatctctttcctttgttcaagtccgaaccaaagtgtctcggttgaagaacttttagtatttggatggttgagtgggtgtttaaggtttggtcttttggatctttgaagtgtttgatagatactgagtttgaatctaccaaaatcaattcataaaaagttcttgtcttcaggatggtggttggtttgtagtgaaatcctggtgggaaagccttggctgtcgccttgaagggatttttgtcccaaaattcaggttccatctgcaaaacagttaacaatttatttttataaatataattgttagtttgtttggtaggtggtgtttgagctttggctaaaggtagttttcctttagtattggtggctgttttggtcat

SEQ ID NO: 16246 - DNA, 1146 bp, Glycine max; identical to SEQ ID NO: 16245
  Gm_smallRNAprecursor_9079

SEQ ID NO: 16247 - DNA, 1147 bp, Glycine max
  Gm_smallRNAprecursor_9080
tacaggacaggtagtattgtccatcattaattacacattaattacaaacaaacggttttctgaccgaaattaaatttaatctaaacagataccaaaacaatcatcttcgttttggtaaaagggatcttcttcgtcttctttggcagaacttgtttcttccttctttgaggatgaaacttcttcttcttgttgtaacatttgtagaacttccttcagatttttagctaagacctcctttgatgtcgatcctgctaaaaatgctgccagatgagacttttggttcaaaaacacagaagtctctggatcagctgccttgaggaattctggatgggattggaaccatagttttacttgttctggatccgctttggatgagtcaaattgtgtccaccattttacaaatgcgtgtctttgtagtgatggatattggtttgtcttttcagtcttgctgtaacgatattgccatgagaatatccatgacagtgcaaagcttgaaaagtatttaagatctgctggaattcgtgattcctgcgaattgtattgtttcttaaattgggaaaatccttgttggaccgtttctgggaatatctctgggattggtccaaagaagtcccaccattgcaaaaaccaattgagaaaattgtaaattgtgttggtcttgaaatatatcagccatgaatgcttgaagcgggtattttggtgccaaaacaccttagtccaagcatcaacgtaatcccaataggtataacctaccggatcaaatggaactgaaaatctctttcctttgttcaagtccgaaccaaagtgtctcggttgaagaacttttagtatttggatggttgagtgggtgtttaaggtttggtcttttggatctttgaagtgtttgatagatactgagtttgaatctaccaaaatcaattcataaaaagttcttgtcttcaggatggtggttggtttgtagtgaaatcctggtgggaaagccttggctgtcgccttgaagggatttttgtcccaaaattcaggttccatctgcaaaacagttaacaatttatttttataaatataattgttagtttgtttggtaggtggtgtttgagctttggctaaaggtagttttcctttagtattggtggctgttttggtcatt

SEQ ID NO: 16248 - DNA, 1147 bp, Glycine max; identical to SEQ ID NO: 16247
  Gm_smallRNAprecursor_9081

SEQ ID NO: 16249 - DNA, 1247 bp, Glycine max
  Gm_smallRNAprecursor_9082
tacaggacaggtagtattgtccatcattaattacacattaattacaaacaaacggttttctgaccgaaattaaatttaatctaaacagataccaaaacaatcatcttcgttttggtaaaagggatcttcttcgtcttctttggcagaacttgtttcttccttctttgaggatgaaacttcttcttcttgttgtaacatttgtagaacttccttcagatttttagctaagacctcctttgatgtcgatcctgctaaaaatgctgccagatgagacttttggttcaaaaacacagaagtctctggatcagctgccttgaggaattctggatgggattggaaccatagttttacttgttctggatccgctttggatgagtcaaattgtgtccaccattttacaaatgcgtgtctttgtagtgatggatattggtttgtcttttcagtcttgctgtaacgatattgccatgagaatatccatgacagtgcaaagcttgaaaagtatttaagatctgctggaattcgtgattcctgcgaattgtattgtttcttaaattgggaaaatccttgttggaccgtttctgggaatatctctgggattggtccaaagaagtcccaccattgcaaaaaccaattgagaaaattgtaaattgtgttggtcttgaaatatatcagccatgaatgcttgaagcgggtattttggtgccaaaacaccttagtccaagcatcaacgtaatcccaataggtataacctaccggatcaaatggaactgaaaatctctttcctttgttcaagtccgaaccaaagtgtctcggttgaagaacttttagtatttggatggttgagtgggtgtttaaggtttggtcttttggatctttgaagtgtttgatagatactgagtttgaatctaccaaaatcaattcataaaaagttcttgtcttcaggatggtggttggtttgtagtgaaatcctggtgggaaagccttggctgtcgccttgaagggatttttgtcccaaaattcaggttccatctgcaaaacagttaacaatttatttttataaatataattgttagtttgtttggtaggtggtgtttgagctttggctaaaggtagttttcctttagtattggtggctgttttggtcattgacgcattttggatcattgtttgtaaatttgattcagattcatcatcagattctgaggcaatgtctgcccaagattttttgattatttttggaaatttgg

SEQ ID NO: 16250 - DNA, 1247 bp, Glycine max; identical to SEQ ID NO: 16249
  Gm_smallRNAprecursor_9083

SEQ ID NO: 16251 - DNA, 1072 bp, Glycine max
  Gm_smallRNAprecursor_9084
acttcttcttcttgttgtaacatttgtagaacttccttcagatttttagctaagacctcctttgatgtcgatcctgctaaaaatgctgccagatgagacttttggttcaaaaacacagaagtctctggatcagctgccttgaggaattctggatgggattggaaccatagttttacttgttctggatccgctttggatgagtcaaattgtgtccaccattttacaaatgcgtgtctttgtagtgatggatattggtttgtcttttcagtcttgctgtaacgatattgccatgagaatatccatgacagtgcaaagcttgaaaagtatttaagatctgctggaattcgtgattcctgcgaattgtattgtttcttaaattgggaaaatccttgttggaccgtttctgggaatatctctgggattggtccaaagaagtcccaccattgcaaaaaccaattgagaaaattgtaaattgtgttggtcttgaaatatatcagccatgaatgcttgaagcgggtattttggtgccaaaacaccttagtccaagcatcaacgtaatcccaataggtataacctaccggatcaaatggaactgaaaatctctttcctttgttcaagtccgaaccaaagtgtctcggttgaagaacttttagtatttggatggttgagtgggtgtttaaggtttggtcttttggatctttgaagtgtttgatagatactgagtttgaatctaccaaaatcaattcataaaaagttcttgtcttcaggatggtggttggtttgtagtgaaatcctggtgggaaagccttggctgtcgccttgaagggatttttgtcccaaaattcaggttccatctgcaaaacagttaacaatttatttttataaatataattgttagtttgtttggtaggtggtgtttgagctttggctaaaggtagttttcctttagtattggtggctgttttggtcattgacgcattttggatcattgtttgtaaatttgattcagattcatcatcagattctgaggcaatgtctgcccaagattttttgattatttttggaaatttgg

SEQ ID NO: 16252 - DNA, 1124 bp, Glycine max
  Gm_smallRNAprecursor_9085
ccttcagatttttagctaagacctcctttgatgtcgatcctgctaaaaatgctgccagatgagacttttggttcaaaaacacagaagtctctggatcagctgccttgaggaattctggatgggattggaaccatagttttacttgttctggatccgctttggatgagtcaaattgtgtccaccattttacaaatgcgtgtctttgtagtgatggatattggtttgtcttttcagtcttgctgtaacgatattgccatgagaatatccatgacagtgcaaagcttgaaaagtatttaagatctgctggaattcgtgattcctgcgaattgtattgtttcttaaattgggaaaatccttgttggaccgtttctgggaatatctctgggattggtccaaagaagtcccaccattgcaaaaaccaattgagaaaattgtaaattgtgttggtcttgaaatatatcagccatgaatgcttgaagcgggtattttggtgccaaaacaccttagtccaagcatcaacgtaatcccaataggtataacctaccggatcaaatggaactgaaaatctctttcctttgttcaagtccgaaccaaagtgtctcggttgaagaacttttagtatttggatggttgagtgggtgtttaaggtttggtcttttggatctttgaagtgtttgatagatactgagtttgaatctaccaaaatcaattcataaaaagttcttgtcttcaggatggtggttggtttgtagtgaaatcctggtgggaaagccttggctgtcgccttgaagggatttttgtcccaaaattcaggttccatctgcaaaacagttaacaatttatttttataaatataattgttagtttgtttggtaggtggtgtttgagctttggctaaaggtagttttcctttagtattggtggctgttttggtcattgacgcattttggatcattgtttgtaaatttgattcagattcatcatcagattctgaggcaatgtctgcccaagattttttgattatttttggaaatttggtcagacccatgtcttgaagggcctgaagggtttcaattggccatgcatagtcggccgatgtttgtttggcggttgccggtttggga

SEQ ID NO: 16253 - DNA, 1130 bp, Glycine max
  Gm_smallRNAprecursor_9086
ccttcagatttttagctaagacctcctttgatgtcgatcctgctaaaaatgctgccagatgagacttttggttcaaaaacacagaagtctctggatcagctgccttgaggaattctggatgggattggaaccatagttttacttgttctggatccgctttggatgagtcaaattgtgtccaccattttacaaatgcgtgtctttgtagtgatggatattggtttgtcttttcagtcttgctgtaacgatattgccatgagaatatccatgacagtgcaaagcttgaaaagtatttaagatctgctggaattcgtgattcctgcgaattgtattgtttcttaaattgggaaaatccttgttggaccgtttctgggaatatctctgggattggtccaaagaagtcccaccattgcaaaaaccaattgagaaaattgtaaattgtgttggtcttgaaatatatcagccatgaatgcttgaagcgggtattttggtgccaaaacaccttagtccaagcatcaacgtaatcccaataggtataacctaccggatcaaatggaactgaaaatctctttcctttgttcaagtccgaaccaaagtgtctcggttgaagaacttttagtatttggatggttgagtgggtgtttaaggtttggtcttttggatctttgaagtgtttgatagatactgagtttgaatctaccaaaatcaattcataaaaagttcttgtcttcaggatggtggttggtttgtagtgaaatcctggtgggaaagccttggctgtcgccttgaagggatttttgtcccaaaattcaggttccatctgcaaaacagttaacaatttatttttataaatataattgttagtttgtttggtaggtggtgtttgagctttggctaaaggtagttttcctttagtattggtggctgttttggtcattgacgcattttggatcattgtttgtaaatttgattcagattcatcatcagattctgaggcaatgtctgcccaagattttttgattatttttggaaatttggtcagacccatgtcttgaagggcctgaagggtttcaattggccatgcatagtcggccgatgtttgtttggcggttgccggtttgggagattcc

SEQ ID NO: 16254 - DNA, 1087 bp, Glycine max
  Gm_smallRNAprecursor_9087
tcctgctaaaaatgctgccagatgagacttttggttcaaaaacacagaagtctctggatcagctgccttgaggaattctggatgggattggaaccatagttttacttgttctggatccgctttggatgagtcaaattgtgtccaccattttacaaatgcgtgtctttgtagtgatggatattggtttgtcttttcagtcttgctgtaacgatattgccatgagaatatccatgacagtgcaaagcttgaaaagtatttaagatctgctggaattcgtgattcctgcgaattgtattgtttcttaaattgggaaaatccttgttggaccgtttctgggaatatctctgggattggtccaaagaagtcccaccattgcaaaaaccaattgagaaaattgtaaattgtgttggtcttgaaatatatcagccatgaatgcttgaagcgggtattttggtgccaaaacaccttagtccaagcatcaacgtaatcccaataggtataacctaccggatcaaatggaactgaaaatctctttcctttgttcaagtccgaaccaaagtgtctcggttgaagaacttttagtatttggatggttgagtgggtgtttaaggtttggtcttttggatctttgaagtgtttgatagatactgagtttgaatctaccaaaatcaattcataaaaagttcttgtcttcaggatggtggttggtttgtagtgaaatcctggtgggaaagccttggctgtcgccttgaagggatttttgtcccaaaattcaggttccatctgcaaaacagttaacaatttatttttataaatataattgttagtttgtttggtaggtggtgtttgagctttggctaaaggtagttttcctttagtattggtggctgttttggtcattgacgcattttggatcattgtttgtaaatttgattcagattcatcatcagattctgaggcaatgtctgcccaagattttttgattatttttggaaatttggtcagacccatgtcttgaagggcctgaagggtttcaattggccatgcatagtcggccgatgtttgtttggcggttgccggtttggga

SEQ ID NO: 16255 - DNA, 1174 bp, Glycine max
  Gm_smallRNAprecursor_9088
cgggtattttggtgccaaaacaccttagtccaagcatcaacgtaatcccaataggtataacctaccggatcaaatggaactgaaaatctctttcctttgttcaagtccgaaccaaagtgtctcggttgaagaacttttagtatttggatggttgagtgggtgtttaaggtttggtcttttggatctttgaagtgtttgatagatactgagtttgaatctaccaaaatcaattcataaaaagttcttgtcttcaggatggtggttggtttgtagtgaaatcctggtgggaaagccttggctgtcgccttgaagggatttttgtcccaaaattcaggttccatctgcaaaacagttaacaatttatttttataaatataattgttagtttgtttggtaggtggtgtttgagctttggctaaaggtagttttcctttagtattggtggctgttttggtcattgacgcattttggatcattgtttgtaaatttgattcagattcatcatcagattctgaggcaatgtctgcccaagattttttgattatttttggaaatttggtcagacccatgtcttgaagggcctgaagggtttcaattggccatgcatagtcggccgatgtttgtttggcggttgccggtttgggagattcctgagtggatggctcaggtttgattgaggcaatctgggttgatgacccttctaaattgtttttctgggtagatgacccagcctgggttggtgacccagaagaggtagatgatttcttgatggttggctctggaagagccagcctggctcctttgcctgtactccttcctccccgtagggagattcccgatgccttaggaggcattaccacttttctgtaagaattcacgggtaaggtagtcaggtagtgaatttgaggtgcccttgatgtattctatgtcaaaatcaaagacacttaaaattgcttgccatcgtgcaaaaatttgttttgaggcaaggtttttaacatctttttgtaaaatatctttggctgatttacaatcaaccctgattaaaaatttttggtttaataaatccgattgaaatttggaaatgcacaaaacaattgctaaaacttcttttttaacagttgaatattttaattgtgcaggattccaatgttttgatgtatatgcaatgacatga

SEQ ID NO: 16256 - DNA, 1173 bp, Glycine max
  Gm_smallRNAprecursor_9089
gggtattttggtgccaaaacaccttagtccaagcatcaacgtaatcccaataggtataacctaccggatcaaatggaactgaaaatctctttcctttgttcaagtccgaaccaaagtgtctcggttgaagaacttttagtatttggatggttgagtgggtgtttaaggtttggtcttttggatctttgaagtgtttgatagatactgagtttgaatctaccaaaatcaattcataaaaagttcttgtcttcaggatggtggttggtttgtagtgaaatcctggtgggaaagccttggctgtcgccttgaagggatttttgtcccaaaattcaggttccatctgcaaaacagttaacaatttatttttataaatataattgttagtttgtttggtaggtggtgtttgagctttggctaaaggtagttttcctttagtattggtggctgttttggtcattgacgcattttggatcattgtttgtaaatttgattcagattcatcatcagattctgaggcaatgtctgcccaagattttttgattatttttggaaatttggtcagacccatgtcttgaagggcctgaagggtttcaattggccatgcatagtcggccgatgtttgtttggcggttgccggtttgggagattcctgagtggatggctcaggtttgattgaggcaatctgggttgatgacccttctaaattgtttttctgggtagatgacccagcctgggttggtgacccagaagaggtagatgatttcttgatggttggctctggaagagccagcctggctcctttgcctgtactccttcctccccgtagggagattcccgatgccttaggaggcattaccacttttctgtaagaattcacgggtaaggtagtcaggtagtgaatttgaggtgcccttgatgtattctatgtcaaaatcaaagacacttaaaattgcttgccatcgtgcaaaaatttgttttgaggcaaggtttttaacatctttttgtaaaatatctttggctgatttacaatcaaccctgattaaaaatttttggtttaataaatccgattgaaatttggaaatgcacaaaacaattgctaaaacttcttttttaacagttgaatattttaattgtgcaggattccaatgttttgatgtatatgcaatgacatga

SEQ ID NO: 16257 - DNA, 1176 bp, Glycine max
  Gm_smallRNAprecursor_9090
gggtattttggtgccaaaacaccttagtccaagcatcaacgtaatcccaataggtataacctaccggatcaaatggaactgaaaatctctttcctttgttcaagtccgaaccaaagtgtctcggttgaagaacttttagtatttggatggttgagtgggtgtttaaggtttggtcttttggatctttgaagtgtttgatagatactgagtttgaatctaccaaaatcaattcataaaaagttcttgtcttcaggatggtggttggtttgtagtgaaatcctggtgggaaagccttggctgtcgccttgaagggatttttgtcccaaaattcaggttccatctgcaaaacagttaacaatttatttttataaatataattgttagtttgtttggtaggtggtgtttgagctttggctaaaggtagttttcctttagtattggtggctgttttggtcattgacgcattttggatcattgtttgtaaatttgattcagattcatcatcagattctgaggcaatgtctgcccaagattttttgattatttttggaaatttggtcagacccatgtcttgaagggcctgaagggtttcaattggccatgcatagtcggccgatgtttgtttggcggttgccggtttgggagattcctgagtggatggctcaggtttgattgaggcaatctgggttgatgacccttctaaattgtttttctgggtagatgacccagcctgggttggtgacccagaagaggtagatgatttcttgatggttggctctggaagagccagcctggctcctttgcctgtactccttcctccccgtagggagattcccgatgccttaggaggcattaccacttttctgtaagaattcacgggtaaggtagtcaggtagtgaatttgaggtgcccttgatgtattctatgtcaaaatcaaagacacttaaaattgcttgccatcgtgcaaaaatttgttttgaggcaaggtttttaacatctttttgtaaaatatctttggctgatttacaatcaaccctgattaaaaatttttggtttaataaatccgattgaaatttggaaatgcacaaaacaattgctaaaacttcttttttaacagttgaatattttaattgtgcaggattccaatgttttgatgtatatgcaatgacatgatct

SEQ ID NO: 16258 - DNA, 1129 bp, Glycine max
  Gm_smallRNAprecursor_9091
ctgcaaaacagttaacaatttatttttataaatataattgttagtttgtttggtaggtggtgtttgagctttggctaaaggtagttttcctttagtattggtggctgttttggtcattgacgcattttggatcattgtttgtaaatttgattcagattcatcatcagattctgaggcaatgtctgcccaagattttttgattatttttggaaatttggtcagacccatgtcttgaagggcctgaagggtttcaattggccatgcatagtcggccgatgtttgtttggcggttgccggtttgggagattcctgagtggatggctcaggtttgattgaggcaatctgggttgatgacccttctaaattgtttttctgggtagatgacccagcctgggttggtgacccagaagaggtagatgatttcttgatggttggctctggaagagccagcctggctcctttgcctgtactccttcctccccgtagggagattcccgatgccttaggaggcattaccacttttctgtaagaattcacgggtaaggtagtcaggtagtgaatttgaggtgcccttgatgtattctatgtcaaaatcaaagacacttaaaattgcttgccatcgtgcaaaaatttgttttgaggcaaggtttttaacatctttttgtaaaatatctttggctgatttacaatcaaccctgattaaaaatttttggtttaataaatccgattgaaatttggaaatgcacaaaacaattgctaaaacttcttttttaacagttgaatattttaattgtgcaggattccaatgttttgatgtatatgcaatgacatgatcttggccatggactctttgtttgaggatgccaccataacctatgtctgaagcatcagtttcaacaattttaaatgcatgtggaataggaagatacagacatttaatggattggactttgactttgacttctttaaccgtttgtgtatggaggtcagaccaaggaggcggatttttcttcagcctatcatgtaatggcttgacaatattatttaaataggggacaaattctcctacgtaatttagacaacctagaaatctttgtaactgggttttgtctaagatttggttggggaa

SEQ ID NO: 16259 - DNA, 1115 bp, Glycine max
  Gm_smallRNAprecursor_9092
acaatttatttttataaatataattgttagtttgtttggtaggtggtgtttgagctttggctaaaggtagttttcctttagtattggtggctgttttggtcattgacgcattttggatcattgtttgtaaatttgattcagattcatcatcagattctgaggcaatgtctgcccaagattttttgattatttttggaaatttggtcagacccatgtcttgaagggcctgaagggtttcaattggccatgcatagtcggccgatgtttgtttggcggttgccggtttgggagattcctgagtggatggctcaggtttgattgaggcaatctgggttgatgacccttctaaattgtttttctgggtagatgacccagcctgggttggtgacccagaagaggtagatgatttcttgatggttggctctggaagagccagcctggctcctttgcctgtactccttcctccccgtagggagattcccgatgccttaggaggcattaccacttttctgtaagaattcacgggtaaggtagtcaggtagtgaatttgaggtgcccttgatgtattctatgtcaaaatcaaagacacttaaaattgcttgccatcgtgcaaaaatttgttttgaggcaaggtttttaacatctttttgtaaaatatctttggctgatttacaatcaaccctgattaaaaatttttggtttaataaatccgattgaaatttggaaatgcacaaaacaattgctaaaacttcttttttaacagttgaatattttaattgtgcaggattccaatgttttgatgtatatgcaatgacatgatcttggccatggactctttgtttgaggatgccaccataacctatgtctgaagcatcagtttcaacaattttaaatgcatgtggaataggaagatacagacatttaatggattggactttgactttgacttctttaaccgtttgtgtatggaggtcagaccaaggaggcggatttttcttcagcctatcatgtaatggcttgacaatattatttaaataggggacaaattctcctacgtaatttagacaacctagaaatctttgtaactgggttttgtctaagatttggttggggaa

SEQ ID NO: 16260 - DNA, 1071 bp, Glycine max
  Gm_smallRNAprecursor_9093
taaattgtttttctgggtagatgacccagcctgggttggtgacccagaagaggtagatgatttcttgatggttggctctggaagagccagcctggctcctttgcctgtactccttcctccccgtagggagattcccgatgccttaggaggcattaccacttttctgtaagaattcacgggtaaggtagtcaggtagtgaatttgaggtgcccttgatgtattctatgtcaaaatcaaagacacttaaaattgcttgccatcgtgcaaaaatttgttttgaggcaaggtttttaacatctttttgtaaaatatctttggctgatttacaatcaaccctgattaaaaatttttggtttaataaatccgattgaaatttggaaatgcacaaaacaattgctaaaacttcttttttaacagttgaatattttaattgtgcaggattccaatgttttgatgtatatgcaatgacatgatcttggccatggactctttgtttgaggatgccaccataacctatgtctgaagcatcagtttcaacaattttaaatgcatgtggaataggaagatacagacatttaatggattggactttgactttgacttctttaaccgtttgtgtatggaggtcagaccaaggaggcggatttttcttcagcctatcatgtaatggcttgacaatattatttaaataggggacaaattctcctacgtaatttagacaacctagaaatctttgtaactgggttttgtctaagatttggttggggaatttgctagcaaactctattgatctttcgattggaatgattgtaccttgatatatattgtgaccaaggaatcgaattcgagtttggaaaagattgatttttgatttggagactgccaaaccattttgtttgatgatatgtatgaaggtttggagatgtttgaaatgttggtcaatgttttgggaaaagattaaaacatcatctatgtagacaatgacaaattttgaataaggattaaaaatatcattcataattttttgaaattctgaaggggcattcttcagtccgaatggcatcacgttcc

SEQ ID NO: 16261 - DNA, 1073 bp, Glycine max
  Gm_smallRNAprecursor_9094
taaattgtttttctgggtagatgacccagcctgggttggtgacccagaagaggtagatgatttcttgatggttggctctggaagagccagcctggctcctttgcctgtactccttcctccccgtagggagattcccgatgccttaggaggcattaccacttttctgtaagaattcacgggtaaggtagtcaggtagtgaatttgaggtgcccttgatgtattctatgtcaaaatcaaagacacttaaaattgcttgccatcgtgcaaaaatttgttttgaggcaaggtttttaacatctttttgtaaaatatctttggctgatttacaatcaaccctgattaaaaatttttggtttaataaatccgattgaaatttggaaatgcacaaaacaattgctaaaacttcttttttaacagttgaatattttaattgtgcaggattccaatgttttgatgtatatgcaatgacatgatcttggccatggactctttgtttgaggatgccaccataacctatgtctgaagcatcagtttcaacaattttaaatgcatgtggaataggaagatacagacatttaatggattggactttgactttgacttctttaaccgtttgtgtatggaggtcagaccaaggaggcggatttttcttcagcctatcatgtaatggcttgacaatattatttaaataggggacaaattctcctacgtaatttagacaacctagaaatctttgtaactgggttttgtctaagatttggttggggaatttgctagcaaactctattgatctttcgattggaatgattgtaccttgatatatattgtgaccaaggaatcgaattcgagtttggaaaagattgatttttgatttggagactgccaaaccattttgtttgatgatatgtatgaaggtttggagatgtttgaaatgttggtcaatgttttgggaaaagattaaaacatcatctatgtagacaatgacaaattttgaataaggattaaaaatatcattcataattttttgaaattctgaaggggcattcttcagtccgaatggcatcacgttccat

SEQ ID NO: 16262 - DNA, 1178 bp, Glycine max
  Gm_smallRNAprecursor_9095
tggttggctctggaagagccagcctggctcctttgcctgtactccttcctccccgtagggagattcccgatgccttaggaggcattaccacttttctgtaagaattcacgggtaaggtagtcaggtagtgaatttgaggtgcccttgatgtattctatgtcaaaatcaaagacacttaaaattgcttgccatcgtgcaaaaatttgttttgaggcaaggtttttaacatctttttgtaaaatatctttggctgatttacaatcaaccctgattaaaaatttttggtttaataaatccgattgaaatttggaaatgcacaaaacaattgctaaaacttcttttttaacagttgaatattttaattgtgcaggattccaatgttttgatgtatatgcaatgacatgatcttggccatggactctttgtttgaggatgccaccataacctatgtctgaagcatcagtttcaacaattttaaatgcatgtggaataggaagatacagacatttaatggattggactttgactttgacttctttaaccgtttgtgtatggaggtcagaccaaggaggcggatttttcttcagcctatcatgtaatggcttgacaatattatttaaataggggacaaattctcctacgtaatttagacaacctagaaatctttgtaactgggttttgtctaagatttggttggggaatttgctagcaaactctattgatctttcgattggaatgattgtaccttgatatatattgtgaccaaggaatcgaattcgagtttggaaaagattgatttttgatttggagactgccaaaccattttgtttgatgatatgtatgaaggtttggagatgtttgaaatgttggtcaatgttttgggaaaagattaaaacatcatctatgtagacaatgacaaattttgaataaggattaaaaatatcattcataattttttgaaattctgaaggggcattcttcagtccgaatggcatcacgttccattcatattgcccgaaaggtacagtaaacgctgttttgtacctatctgattcttggatttggatttgccaaaatccagatttcatatcaaattttgaaaatatctttgcagaatttaatctgttaagcaaatcttttttgtttggaataggatatctaatccattgtaatgcttg

SEQ ID NO: 16263 - DNA, 1080 bp, Glycine max
  Gm_smallRNAprecursor_9096
gatgtttgaaatgttggtcaatgttttgggaaaagattaaaacatcatctatgtagacaatgacaaattttgaataaggattaaaaatatcattcataattttttgaaattctgaaggggcattcttcagtccgaatggcatcacgttccattcatattgcccgaaaggtacagtaaacgctgttttgtacctatctgattcttggatttggatttgccaaaatccagatttcatatcaaattttgaaaatatctttgcagaatttaatctgttaagcaaatcttttttgtttggaataggatatctaatccattgtaatgcttgatttaatggtttgtaatttatgactaagcggggtgttccacgctcaatctcagattgtttgttaacataaaaagccgcacaagaccatgggcttttgcttttccggattaggcctttatcaagcaaatccttgatttccttttgacagtattgaagaagttcttcattcatttggattggtctggcttttgtgggaatttgtttttccctaaagtctttctcataagggagatcgacaatatgtttctttctgtcccaaaatgcatgtggcaattcagaacaaacggtcgattcaatatgatttaataaagattgaattctttcttttacttggggttttcccagttgtatctgaatattattaaaagatacttcttctaataagtagttaatttgattaatcttattttctataagatttatatttctggaaattggtttagtagaaaaattaaatgtaatttttcttcctaaataatttgtggttattccttcattagatatttggatgggaaacagggctctaatgaagggcgttcctaagattacttcattcttaaggttttttaccagaagaaagtttgtgttaatcttaagaccttggttttcaatgattgcatttgatagcttaaaattaatttttaattttgagccgtttgccgtacttaatttttctgaggttttctcaaagaattttgtaggaattaatccttctaaaatgcagtttgaatcagcccctgtatcaaatagggcca

SEQ ID NO: 16264 - DNA, 1076 bp, Glycine max
  Gm_smallRNAprecursor_9097
ccatctttcgggaagagttacttcatcccattttatttttcttgggagagacatgttagcctttgtcatatcagtgataaacaaggttgtttctcctttttgaggttttaacaggactctagatgcacaagtattcatgaccttgtactggatcctataaattaaggctgctgggattgatccttctttcatgtcaaggccatgaaagtggatgtttaagaacagagagtcaagaatgtttctatccatcagactcactgttttgtttggataacaattaaaatatattggaccctgtcctaggctggtttcgactgttccaattagggagtcttcaaattgattatgcctaatatctcttagacacattaaaactgttgcatctatgcccatatcaattaagggcttgatggctacttgtacacaaccgatgtgtaaatatttatacatacggctatgttcataaattgaattttttgaaagtagatgaaattcttcccctatatcttgtcctagaggaatattgttttctactgttttgattatgtaatcaaagttgtgtttgtctttaattgtttcaggaacgtatagttgatcctgagggatttctggaatgttcagtcatccatgttttgattaatatcttcgaatcggacttcctcatcgaagagattgtgttttggggcgacctcttgggtctggttatcttgatcatttaagagattggtgtttcttgaagaagatgaagaggaggaattcgagcgaaaagaaatacgggaaaaggatcgcaataatctagacatgattaaaacattctctaatatctttgccttcatttggttccataggaatctctccataaggctatatgttacagaacttcttggatctgaataaatgaaaaagaagatttttttttttttttgaattacagacaatatagtttgaacattactcctatagccaccagtatattatgtctcaatattttatttgaacaatacaccttagccttactgccctttctcatccacgggacttactgctacattatcattcaactaaaatatcagact

SEQ ID NO: 16265 - DNA, 1158 bp, Glycine max
  Gm_smallRNAprecursor_9098
ccatctttcgggaagagttacttcatcccattttatttttcttgggagagacatgttagcctttgtcatatcagtgataaacaaggttgtttctcctttttgaggttttaacaggactctagatgcacaagtattcatgaccttgtactggatcctataaattaaggctgctgggattgatccttctttcatgtcaaggccatgaaagtggatgtttaagaacagagagtcaagaatgtttctatccatcagactcactgttttgtttggataacaattaaaatatattggaccctgtcctaggctggtttcgactgttccaattagggagtcttcaaattgattatgcctaatatctcttagacacattaaaactgttgcatctatgcccatatcaattaagggcttgatggctacttgtacacaaccgatgtgtaaatatttatacatacggctatgttcataaattgaattttttgaaagtagatgaaattcttcccctatatcttgtcctagaggaatattgttttctactgttttgattatgtaatcaaagttgtgtttgtctttaattgtttcaggaacgtatagttgatcctgagggatttctggaatgttcagtcatccatgttttgattaatatcttcgaatcggacttcctcatcgaagagattgtgttttggggcgacctcttgggtctggttatcttgatcatttaagagattggtgtttcttgaagaagatgaagaggaggaattcgagcgaaaagaaatacgggaaaaggatcgcaataatctagacatgattaaaacattctctaatatctttgccttcatttggttccataggaatctctccataaggctatatgttacagaacttcttggatctgaataaatgaaaaagaagatttttttttttttttgaattacagacaatatagtttgaacattactcctatagccaccagtatattatgtctcaatattttatttgaacaatacaccttagccttactgccctttctcatccacgggacttactgctacattatcattcaactaaaatatcagactgctgtgcttccagaaaatactgttcaaacacatactgtttaaattaaaattactgtacatgcttcagatccataagttcagt

SEQ ID NO: 16266 - DNA, 1056 bp, Glycine max
  Gm_smallRNAprecursor_9099
tgatcctgagggatttctggaatgttcagtcatccatgttttgattaatatcttcgaatcggacttcctcatcgaagagattgtgttttggggcgacctcttgggtctggttatcttgatcatttaagagattggtgtttcttgaagaagatgaagaggaggaattcgagcgaaaagaaatacgggaaaaggatcgcaataatctagacatgattaaaacattctctaatatctttgccttcatttggttccataggaatctctccataaggctatatgttacagaacttcttggatctgaataaatgaaaaagaagatttttttttttttttgaattacagacaatatagtttgaacattactcctatagccaccagtatattatgtctcaatattttatttgaacaatacaccttagccttactgccctttctcatccacgggacttactgctacattatcattcaactaaaatatcagactgctgtgcttccagaaaatactgttcaaacacatactgtttaaattaaaattactgtacatgcttcagatccataagttcagttaacatatgcccttacggacactattcctacttccccatcaggctctgataccagaggtcagcggagtaggatcaaacggacagataggaagtaagaatgcagtatgattaatgaaatgaaaatataaacttgaaaacagatatcaaggtcacaccggagaccggcttacaaaacccaggttttcataaacaaagaaactgaagcggcggcagagccgcacaggatcggtgaagggagaagagagaaagatgaaaaatagaaatttattgaatctagaaagaagcgcttacaaaaatcttgtttcagagcacctctcttccgaaacctgaaaaaatggctaaatgaaagggtgtctcacaacatacttgaggactccttatatagccaaaaatctaagaccggtagttgccggtagttttgaccgggactatttgactgtttgttacaagacaagtagttttgaccgggactttaatggctacaggacag

SEQ ID NO: 16267 - DNA, 1153 bp, Glycine max
  Gm_smallRNAprecursor_9100
tgatcctgagggatttctggaatgttcagtcatccatgttttgattaatatcttcgaatcggacttcctcatcgaagagattgtgttttggggcgacctcttgggtctggttatcttgatcatttaagagattggtgtttcttgaagaagatgaagaggaggaattcgagcgaaaagaaatacgggaaaaggatcgcaataatctagacatgattaaaacattctctaatatctttgccttcatttggttccataggaatctctccataaggctatatgttacagaacttcttggatctgaataaatgaaaaagaagatttttttttttttttgaattacagacaatatagtttgaacattactcctatagccaccagtatattatgtctcaatattttatttgaacaatacaccttagccttactgccctttctcatccacgggacttactgctacattatcattcaactaaaatatcagactgctgtgcttccagaaaatactgttcaaacacatactgtttaaattaaaattactgtacatgcttcagatccataagttcagttaacatatgcccttacggacactattcctacttccccatcaggctctgataccagaggtcagcggagtaggatcaaacggacagataggaagtaagaatgcagtatgattaatgaaatgaaaatataaacttgaaaacagatatcaaggtcacaccggagaccggcttacaaaacccaggttttcataaacaaagaaactgaagcggcggcagagccgcacaggatcggtgaagggagaagagagaaagatgaaaaatagaaatttattgaatctagaaagaagcgcttacaaaaatcttgtttcagagcacctctcttccgaaacctgaaaaaatggctaaatgaaagggtgtctcacaacatacttgaggactccttatatagccaaaaatctaagaccggtagttgccggtagttttgaccgggactatttgactgtttgttacaagacaagtagttttgaccgggactttaatggctacaggacaggtagtattgtccagcattaattacacattaattacaaacagacggttttgtgaccgaaattaaatttaatctaaacagataccaaaacaatcatctt

SEQ ID NO: 16268 - DNA, 1049 bp, Glycine max
  Gm_smallRNAprecursor_9101
cctgagggatttctggaatgttcagtcatccatgttttgattaatatcttcgaatcggacttcctcatcgaagagattgtgttttggggcgacctcttgggtctggttatcttgatcatttaagagattggtgtttcttgaagaagatgaagaggaggaattcgagcgaaaagaaatacgggaaaaggatcgcaataatctagacatgattaaaacattctctaatatctttgccttcatttggttccataggaatctctccataaggctatatgttacagaacttcttggatctgaataaatgaaaaagaagatttttttttttttttgaattacagacaatatagtttgaacattactcctatagccaccagtatattatgtctcaatattttatttgaacaatacaccttagccttactgccctttctcatccacgggacttactgctacattatcattcaactaaaatatcagactgctgtgcttccagaaaatactgttcaaacacatactgtttaaattaaaattactgtacatgcttcagatccataagttcagttaacatatgcccttacggacactattcctacttccccatcaggctctgataccagaggtcagcggagtaggatcaaacggacagataggaagtaagaatgcagtatgattaatgaaatgaaaatataaacttgaaaacagatatcaaggtcacaccggagaccggcttacaaaacccaggttttcataaacaaagaaactgaagcggcggcagagccgcacaggatcggtgaagggagaagagagaaagatgaaaaatagaaatttattgaatctagaaagaagcgcttacaaaaatcttgtttcagagcacctctcttccgaaacctgaaaaaatggctaaatgaaagggtgtctcacaacatacttgaggactccttatatagccaaaaatctaagaccggtagttgccggtagttttgaccgggactatttgactgtttgttacaagacaagtagttttgaccgggactttaatggctacagga

SEQ ID NO: 16269 - DNA, 1052 bp, Glycine max
  Gm_smallRNAprecursor_9102
cctgagggatttctggaatgttcagtcatccatgttttgattaatatcttcgaatcggacttcctcatcgaagagattgtgttttggggcgacctcttgggtctggttatcttgatcatttaagagattggtgtttcttgaagaagatgaagaggaggaattcgagcgaaaagaaatacgggaaaaggatcgcaataatctagacatgattaaaacattctctaatatctttgccttcatttggttccataggaatctctccataaggctatatgttacagaacttcttggatctgaataaatgaaaaagaagatttttttttttttttgaattacagacaatatagtttgaacattactcctatagccaccagtatattatgtctcaatattttatttgaacaatacaccttagccttactgccctttctcatccacgggacttactgctacattatcattcaactaaaatatcagactgctgtgcttccagaaaatactgttcaaacacatactgtttaaattaaaattactgtacatgcttcagatccataagttcagttaacatatgcccttacggacactattcctacttccccatcaggctctgataccagaggtcagcggagtaggatcaaacggacagataggaagtaagaatgcagtatgattaatgaaatgaaaatataaacttgaaaacagatatcaaggtcacaccggagaccggcttacaaaacccaggttttcataaacaaagaaactgaagcggcggcagagccgcacaggatcggtgaagggagaagagagaaagatgaaaaatagaaatttattgaatctagaaagaagcgcttacaaaaatcttgtttcagagcacctctcttccgaaacctgaaaaaatggctaaatgaaagggtgtctcacaacatacttgaggactccttatatagccaaaaatctaagaccggtagttgccggtagttttgaccgggactatttgactgtttgttacaagacaagtagttttgaccgggactttaatggctacaggacag

SEQ ID NO: 16270 - DNA, 1064 bp, Glycine max
  Gm_smallRNAprecursor_9103
cctgagggatttctggaatgttcagtcatccatgttttgattaatatcttcgaatcggacttcctcatcgaagagattgtgttttggggcgacctcttgggtctggttatcttgatcatttaagagattggtgtttcttgaagaagatgaagaggaggaattcgagcgaaaagaaatacgggaaaaggatcgcaataatctagacatgattaaaacattctctaatatctttgccttcatttggttccataggaatctctccataaggctatatgttacagaacttcttggatctgaataaatgaaaaagaagatttttttttttttttgaattacagacaatatagtttgaacattactcctatagccaccagtatattatgtctcaatattttatttgaacaatacaccttagccttactgccctttctcatccacgggacttactgctacattatcattcaactaaaatatcagactgctgtgcttccagaaaatactgttcaaacacatactgtttaaattaaaattactgtacatgcttcagatccataagttcagttaacatatgcccttacggacactattcctacttccccatcaggctctgataccagaggtcagcggagtaggatcaaacggacagataggaagtaagaatgcagtatgattaatgaaatgaaaatataaacttgaaaacagatatcaaggtcacaccggagaccggcttacaaaacccaggttttcataaacaaagaaactgaagcggcggcagagccgcacaggatcggtgaagggagaagagagaaagatgaaaaatagaaatttattgaatctagaaagaagcgcttacaaaaatcttgtttcagagcacctctcttccgaaacctgaaaaaatggctaaatgaaagggtgtctcacaacatacttgaggactccttatatagccaaaaatctaagaccggtagttgccggtagttttgaccgggactatttgactgtttgttacaagacaagtagttttgaccgggactttaatggctacaggacaggtagtattgtcc

SEQ ID NO: 16271 - DNA, 1182 bp, Glycine max
  Gm_smallRNAprecursor_9104
tgtttcagagcacctctcttccgaaacctgaaaaaatggctaaatgaaagggtgtctcacaacatacttgaggactccttatatagccaaaaatctaagaccggtagttgccggtagttttgaccgggactatttgactgtttgttacaagacaagtagttttgaccgggactttaatggctacaggacaggtagtattgtccagcattaattacacattaattacaaacagacggttttgtgaccgaaattaaatttaatctaaacagataccaaaacaatcatcttcgttttggtaaaagggatcttctttgtcttcttcagcaaaacttgtttcttccttctttgaggatgaagcttcttcttcctgttgtaacatttgtagaacttccttcagatttttagctaagacctcctttgatgtcgatcctgctaaaaatgctgccagatgagacttttggttcaaaaacacagaagtctctggatcagctgccttgaggaattctggatgggattggaaccatagttttacttgttctggatccgctttggatgagtcaaattgtgtccaccattttacaaatgtgtgtctttgtagtgatggatattggtttgtcttttcaatcttgctgtaacgatattgccatgagaatatccatgacagtgcaaagcttgaaaagtatttaagatctgctggaattcgtgattcctgcgaattgtattgtttcttaaattgggaaaatccttgttggaccgtttctgggaatatctctgggattggtccaaagaagtcccaccattgcaaaaaccaattgggaaaattgtaaattgtgttggtcttgaaatatatcagccatgattgcttgaagcgggtattttggtgccaaaacaccttagtccaagcatcaacgtaatcccaataggtataacctatcggatcaaatggaactgaaaatctctttcctttgttcaagtccgaaccaaagtgtctcggttgaagaacttttagtatttggatggttgagtgggtgtttaaggtttggtcttttggatctttgaaatgtttgatagatactgagtttgaatctaccaaaatcaattcataaaatgttcttgtcttcaggatggtggttggtttgtagtgaaatcctggtgggaaggccttggccgtcgccttgaagg

SEQ ID NO: 16272 - DNA, 1031 bp, Glycine max
  Gm_smallRNAprecursor_9105
acaagtagttttgaccgggactttaatggctacaggacaggtagtattgtccagcattaattacacattaattacaaacagacggttttgtgaccgaaattaaatttaatctaaacagataccaaaacaatcatcttcgttttggtaaaagggatcttctttgtcttcttcagcaaaacttgtttcttccttctttgaggatgaagcttcttcttcctgttgtaacatttgtagaacttccttcagatttttagctaagacctcctttgatgtcgatcctgctaaaaatgctgccagatgagacttttggttcaaaaacacagaagtctctggatcagctgccttgaggaattctggatgggattggaaccatagttttacttgttctggatccgctttggatgagtcaaattgtgtccaccattttacaaatgtgtgtctttgtagtgatggatattggtttgtcttttcaatcttgctgtaacgatattgccatgagaatatccatgacagtgcaaagcttgaaaagtatttaagatctgctggaattcgtgattcctgcgaattgtattgtttcttaaattgggaaaatccttgttggaccgtttctgggaatatctctgggattggtccaaagaagtcccaccattgcaaaaaccaattgggaaaattgtaaattgtgttggtcttgaaatatatcagccatgattgcttgaagcgggtattttggtgccaaaacaccttagtccaagcatcaacgtaatcccaataggtataacctatcggatcaaatggaactgaaaatctctttcctttgttcaagtccgaaccaaagtgtctcggttgaagaacttttagtatttggatggttgagtgggtgtttaaggtttggtcttttggatctttgaaatgtttgatagatactgagtttgaatctaccaaaatcaattcataaaatgttcttgtcttcaggatggtggttggtttgtagtgaaatcctggtgggaaggccttggccgtcgccttgaagg

SEQ ID NO: 16273 - DNA, 1031 bp, Glycine max; identical to SEQ ID NO: 16272
  Gm_smallRNAprecursor_9106

SEQ ID NO: 16274 - DNA, 1114 bp, Glycine max
  Gm_smallRNAprecursor_9107
ggactttaatggctacaggacaggtagtattgtccagcattaattacacattaattacaaacagacggttttgtgaccgaaattaaatttaatctaaacagataccaaaacaatcatcttcgttttggtaaaagggatcttctttgtcttcttcagcaaaacttgtttcttccttctttgaggatgaagcttcttcttcctgttgtaacatttgtagaacttccttcagatttttagctaagacctcctttgatgtcgatcctgctaaaaatgctgccagatgagacttttggttcaaaaacacagaagtctctggatcagctgccttgaggaattctggatgggattggaaccatagttttacttgttctggatccgctttggatgagtcaaattgtgtccaccattttacaaatgtgtgtctttgtagtgatggatattggtttgtcttttcaatcttgctgtaacgatattgccatgagaatatccatgacagtgcaaagcttgaaaagtatttaagatctgctggaattcgtgattcctgcgaattgtattgtttcttaaattgggaaaatccttgttggaccgtttctgggaatatctctgggattggtccaaagaagtcccaccattgcaaaaaccaattgggaaaattgtaaattgtgttggtcttgaaatatatcagccatgattgcttgaagcgggtattttggtgccaaaacaccttagtccaagcatcaacgtaatcccaataggtataacctatcggatcaaatggaactgaaaatctctttcctttgttcaagtccgaaccaaagtgtctcggttgaagaacttttagtatttggatggttgagtgggtgtttaaggtttggtcttttggatctttgaaatgtttgatagatactgagtttgaatctaccaaaatcaattcataaaatgttcttgtcttcaggatggtggttggtttgtagtgaaatcctggtgggaaggccttggccgtcgccttgaagggatttttgtcccaaaattcaggttccatctgcaaaacagttaacaatttatttttataaatataattgttagtttgtttggtaggtggtgtttgagcttt

SEQ ID NO: 16275 - DNA, 1146 bp, Glycine max
  Gm_smallRNAprecursor_9108
tacaggacaggtagtattgtccagcattaattacacattaattacaaacagacggttttgtgaccgaaattaaatttaatctaaacagataccaaaacaatcatcttcgttttggtaaaagggatcttctttgtcttcttcagcaaaacttgtttcttccttctttgaggatgaagcttcttcttcctgttgtaacatttgtagaacttccttcagatttttagctaagacctcctttgatgtcgatcctgctaaaaatgctgccagatgagacttttggttcaaaaacacagaagtctctggatcagctgccttgaggaattctggatgggattggaaccatagttttacttgttctggatccgctttggatgagtcaaattgtgtccaccattttacaaatgtgtgtctttgtagtgatggatattggtttgtcttttcaatcttgctgtaacgatattgccatgagaatatccatgacagtgcaaagcttgaaaagtatttaagatctgctggaattcgtgattcctgcgaattgtattgtttcttaaattgggaaaatccttgttggaccgtttctgggaatatctctgggattggtccaaagaagtcccaccattgcaaaaaccaattgggaaaattgtaaattgtgttggtcttgaaatatatcagccatgattgcttgaagcgggtattttggtgccaaaacaccttagtccaagcatcaacgtaatcccaataggtataacctatcggatcaaatggaactgaaaatctctttcctttgttcaagtccgaaccaaagtgtctcggttgaagaacttttagtatttggatggttgagtgggtgtttaaggtttggtcttttggatctttgaaatgtttgatagatactgagtttgaatctaccaaaatcaattcataaaatgttcttgtcttcaggatggtggttggtttgtagtgaaatcctggtgggaaggccttggccgtcgccttgaagggatttttgtcccaaaattcaggttccatctgcaaaacagttaacaatttatttttataaatataattgttagtttgtttggtaggtggtgtttgagctttggctaaaggtagttttcctttagtattggtggctgttttggtcat

SEQ ID NO: 16276 - DNA, 1146 bp, Glycine max; identical to SEQ ID NO: 16275
  Gm_smallRNAprecursor_9109

SEQ ID NO: 16277 - DNA, 1147 bp, Glycine max
  Gm_smallRNAprecursor_9110
tacaggacaggtagtattgtccagcattaattacacattaattacaaacagacggttttgtgaccgaaattaaatttaatctaaacagataccaaaacaatcatcttcgttttggtaaaagggatcttctttgtcttcttcagcaaaacttgtttcttccttctttgaggatgaagcttcttcttcctgttgtaacatttgtagaacttccttcagatttttagctaagacctcctttgatgtcgatcctgctaaaaatgctgccagatgagacttttggttcaaaaacacagaagtctctggatcagctgccttgaggaattctggatgggattggaaccatagttttacttgttctggatccgctttggatgagtcaaattgtgtccaccattttacaaatgtgtgtctttgtagtgatggatattggtttgtcttttcaatcttgctgtaacgatattgccatgagaatatccatgacagtgcaaagcttgaaaagtatttaagatctgctggaattcgtgattcctgcgaattgtattgtttcttaaattgggaaaatccttgttggaccgtttctgggaatatctctgggattggtccaaagaagtcccaccattgcaaaaaccaattgggaaaattgtaaattgtgttggtcttgaaatatatcagccatgattgcttgaagcgggtattttggtgccaaaacaccttagtccaagcatcaacgtaatcccaataggtataacctatcggatcaaatggaactgaaaatctctttcctttgttcaagtccgaaccaaagtgtctcggttgaagaacttttagtatttggatggttgagtgggtgtttaaggtttggtcttttggatctttgaaatgtttgatagatactgagtttgaatctaccaaaatcaattcataaaatgttcttgtcttcaggatggtggttggtttgtagtgaaatcctggtgggaaggccttggccgtcgccttgaagggatttttgtcccaaaattcaggttccatctgcaaaacagttaacaatttatttttataaatataattgttagtttgtttggtaggtggtgtttgagctttggctaaaggtagttttcctttagtattggtggctgttttggtcatt

SEQ ID NO: 16278 - DNA, 1147 bp, Glycine max; identical to SEQ ID NO: 16277
  Gm_smallRNAprecursor_9111

SEQ ID NO: 16279 - DNA, 1124 bp, Glycine max
  Gm_smallRNAprecursor_9112
ccttcagatttttagctaagacctcctttgatgtcgatcctgctaaaaatgctgccagatgagacttttggttcaaaaacacagaagtctctggatcagctgccttgaggaattctggatgggattggaaccatagttttacttgttctggatccgctttggatgagtcaaattgtgtccaccattttacaaatgtgtgtctttgtagtgatggatattggtttgtcttttcaatcttgctgtaacgatattgccatgagaatatccatgacagtgcaaagcttgaaaagtatttaagatctgctggaattcgtgattcctgcgaattgtattgtttcttaaattgggaaaatccttgttggaccgtttctgggaatatctctgggattggtccaaagaagtcccaccattgcaaaaaccaattgggaaaattgtaaattgtgttggtcttgaaatatatcagccatgattgcttgaagcgggtattttggtgccaaaacaccttagtccaagcatcaacgtaatcccaataggtataacctatcggatcaaatggaactgaaaatctctttcctttgttcaagtccgaaccaaagtgtctcggttgaagaacttttagtatttggatggttgagtgggtgtttaaggtttggtcttttggatctttgaaatgtttgatagatactgagtttgaatctaccaaaatcaattcataaaatgttcttgtcttcaggatggtggttggtttgtagtgaaatcctggtgggaaggccttggccgtcgccttgaagggatttttgtcccaaaattcaggttccatctgcaaaacagttaacaatttatttttataaatataattgttagtttgtttggtaggtggtgtttgagctttggctaaaggtagttttcctttagtattggtggctgttttggtcattgacgcattttggatcattgtttgtaaatttgattcagattcatcatcagattctgaggcaatgtctgcccaagattttttgattatttttggaaatttggtcagacccatgtcttgaagggcctgaagggtttcaattggccatgcatagtcggccgatgtttgtttggcggttgccggtttggga

SEQ ID NO: 16280 - DNA, 1130 bp, Glycine max
  Gm_smallRNAprecursor_9113
ccttcagatttttagctaagacctcctttgatgtcgatcctgctaaaaatgctgccagatgagacttttggttcaaaaacacagaagtctctggatcagctgccttgaggaattctggatgggattggaaccatagttttacttgttctggatccgctttggatgagtcaaattgtgtccaccattttacaaatgtgtgtctttgtagtgatggatattggtttgtcttttcaatcttgctgtaacgatattgccatgagaatatccatgacagtgcaaagcttgaaaagtatttaagatctgctggaattcgtgattcctgcgaattgtattgtttcttaaattgggaaaatccttgttggaccgtttctgggaatatctctgggattggtccaaagaagtcccaccattgcaaaaaccaattgggaaaattgtaaattgtgttggtcttgaaatatatcagccatgattgcttgaagcgggtattttggtgccaaaacaccttagtccaagcatcaacgtaatcccaataggtataacctatcggatcaaatggaactgaaaatctctttcctttgttcaagtccgaaccaaagtgtctcggttgaagaacttttagtatttggatggttgagtgggtgtttaaggtttggtcttttggatctttgaaatgtttgatagatactgagtttgaatctaccaaaatcaattcataaaatgttcttgtcttcaggatggtggttggtttgtagtgaaatcctggtgggaaggccttggccgtcgccttgaagggatttttgtcccaaaattcaggttccatctgcaaaacagttaacaatttatttttataaatataattgttagtttgtttggtaggtggtgtttgagctttggctaaaggtagttttcctttagtattggtggctgttttggtcattgacgcattttggatcattgtttgtaaatttgattcagattcatcatcagattctgaggcaatgtctgcccaagattttttgattatttttggaaatttggtcagacccatgtcttgaagggcctgaagggtttcaattggccatgcatagtcggccgatgtttgtttggcggttgccggtttgggagattcc

SEQ ID NO: 16281 - DNA, 1174 bp, Glycine max
  Gm_smallRNAprecursor_9114
cgggtattttggtgccaaaacaccttagtccaagcatcaacgtaatcccaataggtataacctatcggatcaaatggaactgaaaatctctttcctttgttcaagtccgaaccaaagtgtctcggttgaagaacttttagtatttggatggttgagtgggtgtttaaggtttggtcttttggatctttgaaatgtttgatagatactgagtttgaatctaccaaaatcaattcataaaatgttcttgtcttcaggatggtggttggtttgtagtgaaatcctggtgggaaggccttggccgtcgccttgaagggatttttgtcccaaaattcaggttccatctgcaaaacagttaacaatttatttttataaatataattgttagtttgtttggtaggtggtgtttgagctttggctaaaggtagttttcctttagtattggtggctgttttggtcattgacgcattttggatcattgtttgtaaatttgattcagattcatcatcagattctgaggcaatgtctgcccaagattttttgattatttttggaaatttggtcagacccatgtcttgaagggcctgaagggtttcaattggccatgcatagtcggccgatgtttgtttggcggttgccggtttgggagattcctgagtggatggctcaggtttgattgaggcaatctgggttgatgacccttctaaattggttttctgggtagaagacccagcctgggttggtgacccagaagaggtagatgatttcttggtggttggctctggaagagccagcctggctcctttgcctgtactccttcctccccgtagggagattcccgatgccttaggaggcattaccacttttctgtaagaattcacgggtaaggtagtcaggtagtgaatttgaggtgcccttgatgtattctatgtcaaaatcaaagacacttaaaattgcttgccatcgtgcaaaaatttgttttgaggcaaggtttttaacatctttttgtaaaatatctttggctgatttacaatcaaccctgattaaaaatttttggtttaataaatccgattgaaatttggaaatgcacaaaacaattgctaaaacctcttttttaacagttgaatattttaattgtgcaggattccaatgttttgatgtatatgcaatgacatga

SEQ ID NO: 16282 - DNA, 1173 bp, Glycine max
  Gm_smallRNAprecursor_9115
gggtattttggtgccaaaacaccttagtccaagcatcaacgtaatcccaataggtataacctatcggatcaaatggaactgaaaatctctttcctttgttcaagtccgaaccaaagtgtctcggttgaagaacttttagtatttggatggttgagtgggtgtttaaggtttggtcttttggatctttgaaatgtttgatagatactgagtttgaatctaccaaaatcaattcataaaatgttcttgtcttcaggatggtggttggtttgtagtgaaatcctggtgggaaggccttggccgtcgccttgaagggatttttgtcccaaaattcaggttccatctgcaaaacagttaacaatttatttttataaatataattgttagtttgtttggtaggtggtgtttgagctttggctaaaggtagttttcctttagtattggtggctgttttggtcattgacgcattttggatcattgtttgtaaatttgattcagattcatcatcagattctgaggcaatgtctgcccaagattttttgattatttttggaaatttggtcagacccatgtcttgaagggcctgaagggtttcaattggccatgcatagtcggccgatgtttgtttggcggttgccggtttgggagattcctgagtggatggctcaggtttgattgaggcaatctgggttgatgacccttctaaattggttttctgggtagaagacccagcctgggttggtgacccagaagaggtagatgatttcttggtggttggctctggaagagccagcctggctcctttgcctgtactccttcctccccgtagggagattcccgatgccttaggaggcattaccacttttctgtaagaattcacgggtaaggtagtcaggtagtgaatttgaggtgcccttgatgtattctatgtcaaaatcaaagacacttaaaattgcttgccatcgtgcaaaaatttgttttgaggcaaggtttttaacatctttttgtaaaatatctttggctgatttacaatcaaccctgattaaaaatttttggtttaataaatccgattgaaatttggaaatgcacaaaacaattgctaaaacctcttttttaacagttgaatattttaattgtgcaggattccaatgttttgatgtatatgcaatgacatga

SEQ ID NO: 16283 - DNA, 1176 bp, Glycine max
  Gm_smallRNAprecursor_9116
gggtattttggtgccaaaacaccttagtccaagcatcaacgtaatcccaataggtataacctatcggatcaaatggaactgaaaatctctttcctttgttcaagtccgaaccaaagtgtctcggttgaagaacttttagtatttggatggttgagtgggtgtttaaggtttggtcttttggatctttgaaatgtttgatagatactgagtttgaatctaccaaaatcaattcataaaatgttcttgtcttcaggatggtggttggtttgtagtgaaatcctggtgggaaggccttggccgtcgccttgaagggatttttgtcccaaaattcaggttccatctgcaaaacagttaacaatttatttttataaatataattgttagtttgtttggtaggtggtgtttgagctttggctaaaggtagttttcctttagtattggtggctgttttggtcattgacgcattttggatcattgtttgtaaatttgattcagattcatcatcagattctgaggcaatgtctgcccaagattttttgattatttttggaaatttggtcagacccatgtcttgaagggcctgaagggtttcaattggccatgcatagtcggccgatgtttgtttggcggttgccggtttgggagattcctgagtggatggctcaggtttgattgaggcaatctgggttgatgacccttctaaattggttttctgggtagaagacccagcctgggttggtgacccagaagaggtagatgatttcttggtggttggctctggaagagccagcctggctcctttgcctgtactccttcctccccgtagggagattcccgatgccttaggaggcattaccacttttctgtaagaattcacgggtaaggtagtcaggtagtgaatttgaggtgcccttgatgtattctatgtcaaaatcaaagacacttaaaattgcttgccatcgtgcaaaaatttgttttgaggcaaggtttttaacatctttttgtaaaatatctttggctgatttacaatcaaccctgattaaaaatttttggtttaataaatccgattgaaatttggaaatgcacaaaacaattgctaaaacctcttttttaacagttgaatattttaattgtgcaggattccaatgttttgatgtatatgcaatgacatgatct

SEQ ID NO: 16284 - DNA, 1129 bp, Glycine max
  Gm_smallRNAprecursor_9117
ctgcaaaacagttaacaatttatttttataaatataattgttagtttgtttggtaggtggtgtttgagctttggctaaaggtagttttcctttagtattggtggctgttttggtcattgacgcattttggatcattgtttgtaaatttgattcagattcatcatcagattctgaggcaatgtctgcccaagattttttgattatttttggaaatttggtcagacccatgtcttgaagggcctgaagggtttcaattggccatgcatagtcggccgatgtttgtttggcggttgccggtttgggagattcctgagtggatggctcaggtttgattgaggcaatctgggttgatgacccttctaaattggttttctgggtagaagacccagcctgggttggtgacccagaagaggtagatgatttcttggtggttggctctggaagagccagcctggctcctttgcctgtactccttcctccccgtagggagattcccgatgccttaggaggcattaccacttttctgtaagaattcacgggtaaggtagtcaggtagtgaatttgaggtgcccttgatgtattctatgtcaaaatcaaagacacttaaaattgcttgccatcgtgcaaaaatttgttttgaggcaaggtttttaacatctttttgtaaaatatctttggctgatttacaatcaaccctgattaaaaatttttggtttaataaatccgattgaaatttggaaatgcacaaaacaattgctaaaacctcttttttaacagttgaatattttaattgtgcaggattccaatgttttgatgtatatgcaatgacatgatcttggccatggactctttgtttgaggatgccaccataacctatgtctgaagcatcagtttcgacaattttaaatgcctgtggaataggaagatacagacatttaatggattggactttgactttgacttctttaaccgtttgtgtatggaggtcagaccaaggaggcggatttttcttcagcctatcatgtaatggcttgacaatattatttaaataggggacaaattctcctacgtaatttagacaacctagaaatctttgtaactaggttttgtctaagatttggttggggaa

SEQ ID NO: 16285 - DNA, 1115 bp, Glycine max
  Gm_smallRNAprecursor_9118
acaatttatttttataaatataattgttagtttgtttggtaggtggtgtttgagctttggctaaaggtagttttcctttagtattggtggctgttttggtcattgacgcattttggatcattgtttgtaaatttgattcagattcatcatcagattctgaggcaatgtctgcccaagattttttgattatttttggaaatttggtcagacccatgtcttgaagggcctgaagggtttcaattggccatgcatagtcggccgatgtttgtttggcggttgccggtttgggagattcctgagtggatggctcaggtttgattgaggcaatctgggttgatgacccttctaaattggttttctgggtagaagacccagcctgggttggtgacccagaagaggtagatgatttcttggtggttggctctggaagagccagcctggctcctttgcctgtactccttcctccccgtagggagattcccgatgccttaggaggcattaccacttttctgtaagaattcacgggtaaggtagtcaggtagtgaatttgaggtgcccttgatgtattctatgtcaaaatcaaagacacttaaaattgcttgccatcgtgcaaaaatttgttttgaggcaaggtttttaacatctttttgtaaaatatctttggctgatttacaatcaaccctgattaaaaatttttggtttaataaatccgattgaaatttggaaatgcacaaaacaattgctaaaacctcttttttaacagttgaatattttaattgtgcaggattccaatgttttgatgtatatgcaatgacatgatcttggccatggactctttgtttgaggatgccaccataacctatgtctgaagcatcagtttcgacaattttaaatgcctgtggaataggaagatacagacatttaatggattggactttgactttgacttctttaaccgtttgtgtatggaggtcagaccaaggaggcggatttttcttcagcctatcatgtaatggcttgacaatattatttaaataggggacaaattctcctacgtaatttagacaacctagaaatctttgtaactaggttttgtctaagatttggttggggaa

SEQ ID NO: 16286 - DNA, 981 bp, Glycine max
  Gm_smallRNAprecursor_9119
taaattggttttctgggtagaagacccagcctgggttggtgacccagaagaggtagatgatttcttggtggttggctctggaagagccagcctggctcctttgcctgtactccttcctccccgtagggagattcccgatgccttaggaggcattaccacttttctgtaagaattcacgggtaaggtagtcaggtagtgaatttgaggtgcccttgatgtattctatgtcaaaatcaaagacacttaaaattgcttgccatcgtgcaaaaatttgttttgaggcaaggtttttaacatctttttgtaaaatatctttggctgatttacaatcaaccctgattaaaaatttttggtttaataaatccgattgaaatttggaaatgcacaaaacaattgctaaaacctcttttttaacagttgaatattttaattgtgcaggattccaatgttttgatgtatatgcaatgacatgatcttggccatggactctttgtttgaggatgccaccataacctatgtctgaagcatcagtttcgacaattttaaatgcctgtggaataggaagatacagacatttaatggattggactttgactttgacttctttaaccgtttgtgtatggaggtcagaccaaggaggcggatttttcttcagcctatcatgtaatggcttgacaatattatttaaataggggacaaattctcctacgtaatttagacaacctagaaatctttgtaactaggttttgtctaagatttggttggggaatttgctagcaaactctattgatctttcaattggaatgattgtaccttgatatatattgtgaccaaggaatcgaattcgagtttggaaaagattgatttttgatttggagactgccaaaccattttgtttgatgatatgtatgaaggtttggagatgtttgaaatgttggtcaatgttttgggaaaagattaaaacatcatctatgtggtacc

SEQ ID NO: 16287 - DNA, 981 bp, Glycine max; identical to SEQ ID NO: 16286
  Gm_smallRNAprecursor_9120

SEQ ID NO: 16288 - DNA, 913 bp, Glycine max
  Gm_smallRNAprecursor_9121
tggttggctctggaagagccagcctggctcctttgcctgtactccttcctccccgtagggagattcccgatgccttaggaggcattaccacttttctgtaagaattcacgggtaaggtagtcaggtagtgaatttgaggtgcccttgatgtattctatgtcaaaatcaaagacacttaaaattgcttgccatcgtgcaaaaatttgttttgaggcaaggtttttaacatctttttgtaaaatatctttggctgatttacaatcaaccctgattaaaaatttttggtttaataaatccgattgaaatttggaaatgcacaaaacaattgctaaaacctcttttttaacagttgaatattttaattgtgcaggattccaatgttttgatgtatatgcaatgacatgatcttggccatggactctttgtttgaggatgccaccataacctatgtctgaagcatcagtttcgacaattttaaatgcctgtggaataggaagatacagacatttaatggattggactttgactttgacttctttaaccgtttgtgtatggaggtcagaccaaggaggcggatttttcttcagcctatcatgtaatggcttgacaatattatttaaataggggacaaattctcctacgtaatttagacaacctagaaatctttgtaactaggttttgtctaagatttggttggggaatttgctagcaaactctattgatctttcaattggaatgattgtaccttgatatatattgtgaccaaggaatcgaattcgagtttggaaaagattgatttttgatttggagactgccaaaccattttgtttgatgatatgtatgaaggtttggagatgtttgaaatgttggtcaatgttttgggaaaagattaaaacatcatctatgtggtacc

SEQ ID NO: 16289 - DNA, 934 bp, Glycine max
  Gm_smallRNAprecursor_9122
caatgacatagccttctttctaaaacaattctctaaaactatcaattatcaactatcatctaatcaactaccaacagtggcatcagagctacgttcgatcatacattgggcgtagttatcttacctacctaccattccaaaatcctcccaactacttcaaaaatttcctttgtactattaagcaactctaataatatttttttctaagctatggataacactactcaatcatcaactatttctgtccctatcttcaatggtgaaaattatgatttctaacgtgttaaaatggaaacatatttttcatctcaagatttatgggacatagtagaagtgggcttcacttttcccgcggatacttcagctcttaatgcatctcaagaaaaagagttgaagaaaaataaacagaaaaattcaaaggtgttgttcaccttgcaacaagcggtgactgatccaattttcccaagaattgtgggagctaagactgccaaagaagcgtggaacacattgcaggaggagtttcaaggaagtgttaaggtacgtgccgttaaacttcaatctctaagaagatattttgaactattgaagatgaaggagtctgagacagttaaagattactattctaaagttaaagaaatagttaatcaaatgagagcttttggagaagatattcttgacaagaaaattattgagaaaattctaattactatgccccaaaagtttgacccaatcgtgacaacgattgaggaaaccaaagatatgtccactctatcaaagacaaaacttgtgggctctcttgaagcatatgagcaaagactgtataggcataaagaagatacacttgaaaatgcctttcagtcaaagtttaaatttcagccccaaaacaaagaaaatggaggaaagaaaaattatggagaaacttccagaagaagag

SEQ ID NO: 16290 - DNA, 1071 bp, Glycine max
  Gm_smallRNAprecursor_9123
tttccgttcttgacaattggtctgggtcattgttccaaaatttcttccaaaaaatctggcgggggttctttaaaaataaatgttaatcaatattcgaatagcgttggttaagaaatttaaaataaacatatttttattaggagacaaaaaattatattgtgtataatatttttacgttctcttataatttatagaatatatatttttccttttagttctttaactaaattaatatcttaagattatgattgatggtattgcctggaattgatgtggcattagaatacacacgttaaccttcttcgtcaattctattagggtgttgctaggtgcatccaatattattggtggtgcacccaacattttttaaaaatgtcaaaattatccttgtactttcttcgcatttgtgatgggtgtacgtgagggtggtccgtaaatcgaacggatcaagttgatccgtaaggttaatatggatcaagttgatccgtatgttgatattaagcgcatacggatcaacttgattcgtaaaagacttatggatcaagttgatccgtaaaagatttacagatcaagttgatccataaaagacttacggattaagggtatttcagtcttttccccttaagtgctaggtgcaccagcaataatactgggtgcacctagcaacacccattctattataggagcacagacacaacccctttagcaattaggctattaggccagtaagctgataatatatttgaattttaatgataatgttattatcatctttccaacaagcacctccacttatctagtagatacaaatcatctacaagagtcataacaaccccgatcatcaagtatccgaggctctcatccaatgctataaatatcaggttctatctttcctgattcattctcaactcactcatgtactacttacttgagcatcgggattctttgttttccaggtgtccttgtgttttccaagtggaggatatttgtaatccgacatgatagatcatgaaacccatcttgactacgtcaatcaactccagattttaataagtacattaataatatcct

SEQ ID NO: 16291 - DNA, 1092 bp, Glycine max
  Gm_smallRNAprecursor_9124
gaaataaaataactttatttgaatttgagttgaaggtctttttccagttacaatttcaaatatttatagactaatgtattgattcatataaattgggatcttatcaatgttgttaatggcggatggcggttcatggcggaaagtcaaaaatccgccataaaaatatggcggatggcgtagcggaaaatggcggatgtcatggcggacacaaaaaaaaaaaaaaaaacatatatataaactcattgaaattgaaaaaaacaaaggattgcattcaaataaactaaaaaagtttcatgagttcatacaataatcaagtaccaacaccaaataaactcattaaagagttcaaaataagaaaatgataaaaacataatgcaaagtgcaaagtgaaggttgaggctctaatcatcttctccaatcccaacataatcatcttcgttgttatcatatggtaatggagcatctccctctccctcttccccatcagacgcctcaaaattgaccatgatttcttcttcttcagattcaacatcaatattctcctcaacatctagatcctcatcattttcttggactgctttttgcttccttgatgaagatccaacaaccattgcctgttttttagaagtttgggcagcagcaacacttgttttttgctttttccgcctagtatacatcctacactctccaacccccgaagcctgatacacagttgcccaatttagagcatcatcatcttcaaataccaaatcatttccagcatcattatcatcatcttgatccatctctcccacgagccattcattgcatacatcaatatcattaagagaaattggatcaatttcatctcttgcattatatctttgcttcaattgttggttgtatttgacaaacaccaaatcatgcaacctcttgtgctcaagcctatttctttttttggaatgaatctacaacataacaaataaatgttgatttcaatctcaaatatactccaaatataacttgatcatcaaaattaaataaaattaaaaagtatagttagagttttgtcacaattacttgctcaaacacactccaatttctttcacatcc

SEQ ID NO: 16292 - DNA, 1133 bp, Glycine max
  Gm_smallRNAprecursor_9125
aaatggcggatgtcatggcggacacaaaaaaaaaaaaaaaaacatatatataaactcattgaaattgaaaaaaacaaaggattgcattcaaataaactaaaaaagtttcatgagttcatacaataatcaagtaccaacaccaaataaactcattaaagagttcaaaataagaaaatgataaaaacataatgcaaagtgcaaagtgaaggttgaggctctaatcatcttctccaatcccaacataatcatcttcgttgttatcatatggtaatggagcatctccctctccctcttccccatcagacgcctcaaaattgaccatgatttcttcttcttcagattcaacatcaatattctcctcaacatctagatcctcatcattttcttggactgctttttgcttccttgatgaagatccaacaaccattgcctgttttttagaagtttgggcagcagcaacacttgttttttgctttttccgcctagtatacatcctacactctccaacccccgaagcctgatacacagttgcccaatttagagcatcatcatcttcaaataccaaatcatttccagcatcattatcatcatcttgatccatctctcccacgagccattcattgcatacatcaatatcattaagagaaattggatcaatttcatctcttgcattatatctttgcttcaattgttggttgtatttgacaaacaccaaatcatgcaacctcttgtgctcaagcctatttctttttttggaatgaatctacaacataacaaataaatgttgatttcaatctcaaatatactccaaatataacttgatcatcaaaattaaataaaattaaaaagtatagttagagttttgtcacaattacttgctcaaacacactccaatttctttcacatcctgaagcactgcaagtcaaactcaaaatcttaatagccagcttctgcaaatttggagtttgtgacccaaacattcgccaccaatatgctgcaataccaattaccaaccaagagcataacttagaattctgaattctaacactaatacataaaaaaaatagtatgataaaagtttcttactaggagaatgggttttcctttgagccattgcaaagtcggaaccaaag

SEQ ID NO: 16293 - DNA, 1082 bp, Glycine max
  Gm_smallRNAprecursor_9126
tcaaagtagttgagaaaaattaaaatgttttaatagaaacaatgtgattattgaggagcatgttaattaaggctagcatcattgtgttgtcagtgaaaacaaaccgatgtatcagctaaaagcttcaacacgattccaaaataatgtttaagcgattgacgctagaaaatgagatctgcttcctaacaatggaattcccaagtcactcaaaaaaggacttagtgtaggtgaagtagttcatcaagaaactaactcaaacggtaaagggacttgaaaagctgaaaataatagaaagctaataaattgtgaaaagataatatcttgaaataaaataactttatttgaatttgagttgaaggtctttttccagttacaatttcaaatatttatagactaatgtattgattcatataaattgggatcttatcaatgttgttaatggcggatggcggttcatggcggaaagtcaaaaatccgccataaaaatatggcggatggcgtagcggaaaatggcggatgtcatggcggacacaaaaaaaaaaaaaaaaacatatatataaactcattgaaattgaaaaaaacaaaggattgcattcaaataaactaaaaaagtttcatgagttcatacaataatcaagtaccaacaccaaataaactcattaaagagttcaaaataagaaaatgataaaaacataatgcaaagtgcaaagtgaaggttgaggctctaatcatcttctccaatcccaacataatcatcttcgttgttatcatatggtaatggagcatctccctctccctcttccccatcagacgcctcaaaattgaccatgatttcttcttcttcagattcaacatcaatattctcctcaacatctagatcctcatcattttcttggactgctttttgcttccttgatgaagatccaacaaccattgcctgttttttagaagtttgggcagcagcaacacttgttttttgctttttccgcctagtatacatcctacactctccaacccccgaagcctgatacacagttgcccaatttagagcatcatcatcttcaaataccaaatcatttcca

SEQ ID NO: 16294 - DNA, 1131 bp, Glycine max
  Gm_smallRNAprecursor_9127
tggcggatgtcatggcggacacaaaaaaaaaaaaaaaaacatatatataaactcattgaaattgaaaaaaacaaaggattgcattcaaataaactaaaaaagtttcatgagttcatacaataatcaagtaccaacaccaaataaactcattaaagagttcaaaataagaaaatgataaaaacataatgcaaagtgcaaagtgaaggttgaggctctaatcatcttctccaatcccaacataatcatcttcgttgttatcatatggtaatggagcatctccctctccctcttccccatcagacgcctcaaaattgaccatgatttcttcttcttcagattcaacatcaatattctcctcaacatctagatcctcatcattttcttggactgctttttgcttccttgatgaagatccaacaaccattgcctgttttttagaagtttgggcagcagcaacacttgttttttgctttttccgcctagtatacatcctacactctccaacccccgaagcctgatacacagttgcccaatttagagcatcatcatcttcaaataccaaatcatttccagcatcattatcatcatcttgatccatctctcccacgagccattcattgcatacatcaatatcattaagagaaattggatcaatttcatctcttgcattatatctttgcttcaattgttggttgtatttgacaaacaccaaatcatgcaacctcttgtgctcaagcctatttctttttttggaatgaatctacaacataacaaataaatgttgatttcaatctcaaatatactccaaatataacttgatcatcaaaattaaataaaattaaaaagtatagttagagttttgtcacaattacttgctcaaacacactccaatttctttcacatcctgaagcactgcaagtcaaactcaaaatcttaatagccagcttctgcaaatttggagtttgtgacccaaacattcgccaccaatatgctgcaataccaattaccaaccaagagcataacttagaattctgaattctaacactaatacataaaaaaaatagtatgataaaagtttcttactaggagaatgggttttcctttgagccattgcaaagtcggaaccaaagt

SEQ ID NO: 16295 - DNA, 1157 bp, Glycine max
  Gm_smallRNAprecursor_9128
acatatgttacaaattatggattggaactaaagtcttgtatagtacacgtaatattttactttgatttgtacagtaagtgtttgaacagtacttcctggaagtacagcagtctaatattttagttgaatggtactgtagcagtaagacccgtgttggataaagggcggtaaggctaaggtgtactatttaaccaaaatatcaagacataatacactggtggctataggattgccgttcaaactgtttttttttttttaaaaaagagtttttcttaaaaataatccagatccagaaaaattttgtgacatatttacttacggagatattcctatggaaccacatgagggcaaagatattagagaatattataatcatgtctagactattacgatctttttcccgtatctcttttcgctcaaactcctcctcatcatcttcttcaagaaactccaatttattaaatgatcaagacaaccagacccaagaggtcgccccaaaacacaatctcttcgatgaggaagtccggttcgaagatatcaatcaaaacatggatgactggaacattccagaaatccctcaggatcaactatacgttcctgaaacaataaaagacaaacacaactttgattacataatcaaaacagtagaaaacaatattcctctaggacaagatataggggaagaatttcatttgctttaaaaaaattcaatttatgaacatagccgtaagtataaatatctacacatcggttgtgtacaagtagccatcaagcccttaattgatatgggcatagatgcagcagttttaatgtgtctaagagacattaggcataatcaatttgaagactccctaattggaacagtcgaaaccagcctaggacaaggtccaatatattttaactgttatccaaacaaaacagtgagtctgatggacagaaacattcttgactctctgttcttaaacatccactttcatggcctagacatgaaagaaggatcaatcccagcagccttaatttataggatccagtataaggtcatgaatacttgtgcatctagagtcctgttaaaacctcaaaaaggagaaacaaccttgtttatcactgatatgacaaaggctaacgtttctctcccgagataaataaaatgggatgag

SEQ ID NO: 16296 - DNA, 1071 bp, Glycine max
  Gm_smallRNAprecursor_9129
caaacagaccaaaactgtctgcaaccaaagaccaagccaatcgttgactcaacaagaatcaacatcacaacccagcagcagttatatttcaaaaaacaagtttttcaattttttacaaatggaaccagaatactgggacaagaatcccttcaaagcaaccgccaaagtattccccccaggattccattacaggccaatagccacaaacaaaacccgtaaattctacgaattcattctaatagatacgaactcagtatctattaaacacttcaaagaccccaaagatccaaatctaaatacccattccacaatccaaatcctaaaggttatgcagccacgacattatggctcaaacctaaaccaacccaaaaaattttctgctccatttaaccccgtaggatataattattgggattacatcgacgcctggaccaatgtgttctggcatcaaaatagtaaattcaagcattcatggctaatttactttaaaaataatactgtgtataattttccaaattggttcctccaatggtggaactacttcggaccaattccacaaatattcccagaagaagtccaacagggattccaacaattcaacaagctctataatagcaaggaatcacgtattccaacagatctaaaatacttttccagttttgccttgtcatggattttttcatggcaatacagatacggaaaaactgaaaacagcaagcaatatccaccgttacagagacacgcctttgtaaaatggtggtcacaattcgatacttcaaaggctgctccagatcaagtcaagaactggttccagagcaatcctgagttccttaaacctgctgatccagagacatctctgttcctgaatcagaagtcgcaactggcagcattcttagcaagctcaaaatctaaagagagtcttgctcagaatctcaaagaagttctccaactagttcaacaggaagtggaagaagaaccttccaaaaaggaagctgaatcatcagagactaatgatgaccaagaagacgatccattctaccagaatgaagatgattgtttcggtatatcatt

SEQ ID NO: 16297 - DNA, 1094 bp, Glycine max
  Gm_smallRNAprecursor_9130
aagaatcaacatcacaacccagcagcagttatatttcaaaaaacaagtttttcaattttttacaaatggaaccagaatactgggacaagaatcccttcaaagcaaccgccaaagtattccccccaggattccattacaggccaatagccacaaacaaaacccgtaaattctacgaattcattctaatagatacgaactcagtatctattaaacacttcaaagaccccaaagatccaaatctaaatacccattccacaatccaaatcctaaaggttatgcagccacgacattatggctcaaacctaaaccaacccaaaaaattttctgctccatttaaccccgtaggatataattattgggattacatcgacgcctggaccaatgtgttctggcatcaaaatagtaaattcaagcattcatggctaatttactttaaaaataatactgtgtataattttccaaattggttcctccaatggtggaactacttcggaccaattccacaaatattcccagaagaagtccaacagggattccaacaattcaacaagctctataatagcaaggaatcacgtattccaacagatctaaaatacttttccagttttgccttgtcatggattttttcatggcaatacagatacggaaaaactgaaaacagcaagcaatatccaccgttacagagacacgcctttgtaaaatggtggtcacaattcgatacttcaaaggctgctccagatcaagtcaagaactggttccagagcaatcctgagttccttaaacctgctgatccagagacatctctgttcctgaatcagaagtcgcaactggcagcattcttagcaagctcaaaatctaaagagagtcttgctcagaatctcaaagaagttctccaactagttcaacaggaagtggaagaagaaccttccaaaaaggaagctgaatcatcagagactaatgatgaccaagaagacgatccattctaccagaatgaagatgattgtttcggtatatcattagacgacgattaattagttgtagtaatcatgaattattataactaatttgtcagaatcttttaagaaatgtaattt

SEQ ID NO: 16298 - DNA, 1191 bp, Glycine max
  Gm_smallRNAprecursor_9131
gttatatttcaaaaaacaagtttttcaattttttacaaatggaaccagaatactgggacaagaatcccttcaaagcaaccgccaaagtattccccccaggattccattacaggccaatagccacaaacaaaacccgtaaattctacgaattcattctaatagatacgaactcagtatctattaaacacttcaaagaccccaaagatccaaatctaaatacccattccacaatccaaatcctaaaggttatgcagccacgacattatggctcaaacctaaaccaacccaaaaaattttctgctccatttaaccccgtaggatataattattgggattacatcgacgcctggaccaatgtgttctggcatcaaaatagtaaattcaagcattcatggctaatttactttaaaaataatactgtgtataattttccaaattggttcctccaatggtggaactacttcggaccaattccacaaatattcccagaagaagtccaacagggattccaacaattcaacaagctctataatagcaaggaatcacgtattccaacagatctaaaatacttttccagttttgccttgtcatggattttttcatggcaatacagatacggaaaaactgaaaacagcaagcaatatccaccgttacagagacacgcctttgtaaaatggtggtcacaattcgatacttcaaaggctgctccagatcaagtcaagaactggttccagagcaatcctgagttccttaaacctgctgatccagagacatctctgttcctgaatcagaagtcgcaactggcagcattcttagcaagctcaaaatctaaagagagtcttgctcagaatctcaaagaagttctccaactagttcaacaggaagtggaagaagaaccttccaaaaaggaagctgaatcatcagagactaatgatgaccaagaagacgatccattctaccagaatgaagatgattgtttcggtatatcattagacgacgattaattagttgtagtaatcatgaattattataactaatttgtcagaatcttttaagaaatgtaatttgtaaaagttttgtaacagttccagtaaacattaccgacactgtagaaacagtaaaaattgagtctatttaaaggagtcctcgttccctttgtgaggcacccttcagatagtctcagaatcaggt

SEQ ID NO: 16299 - DNA, 1066 bp, Glycine max
  Gm_smallRNAprecursor_9132
atttcaaaaaacaagtttttcaattttttacaaatggaaccagaatactgggacaagaatcccttcaaagcaaccgccaaagtattccccccaggattccattacaggccaatagccacaaacaaaacccgtaaattctacgaattcattctaatagatacgaactcagtatctattaaacacttcaaagaccccaaagatccaaatctaaatacccattccacaatccaaatcctaaaggttatgcagccacgacattatggctcaaacctaaaccaacccaaaaaattttctgctccatttaaccccgtaggatataattattgggattacatcgacgcctggaccaatgtgttctggcatcaaaatagtaaattcaagcattcatggctaatttactttaaaaataatactgtgtataattttccaaattggttcctccaatggtggaactacttcggaccaattccacaaatattcccagaagaagtccaacagggattccaacaattcaacaagctctataatagcaaggaatcacgtattccaacagatctaaaatacttttccagttttgccttgtcatggattttttcatggcaatacagatacggaaaaactgaaaacagcaagcaatatccaccgttacagagacacgcctttgtaaaatggtggtcacaattcgatacttcaaaggctgctccagatcaagtcaagaactggttccagagcaatcctgagttccttaaacctgctgatccagagacatctctgttcctgaatcagaagtcgcaactggcagcattcttagcaagctcaaaatctaaagagagtcttgctcagaatctcaaagaagttctccaactagttcaacaggaagtggaagaagaaccttccaaaaaggaagctgaatcatcagagactaatgatgaccaagaagacgatccattctaccagaatgaagatgattgtttcggtatatcattagacgacgattaattagttgtagtaatcatgaattattataactaatttgtcagaatcttttaagaaatgtaatttgtaa

SEQ ID NO: 16300 - DNA, 1067 bp, Glycine max
  Gm_smallRNAprecursor_9133
atttcaaaaaacaagtttttcaattttttacaaatggaaccagaatactgggacaagaatcccttcaaagcaaccgccaaagtattccccccaggattccattacaggccaatagccacaaacaaaacccgtaaattctacgaattcattctaatagatacgaactcagtatctattaaacacttcaaagaccccaaagatccaaatctaaatacccattccacaatccaaatcctaaaggttatgcagccacgacattatggctcaaacctaaaccaacccaaaaaattttctgctccatttaaccccgtaggatataattattgggattacatcgacgcctggaccaatgtgttctggcatcaaaatagtaaattcaagcattcatggctaatttactttaaaaataatactgtgtataattttccaaattggttcctccaatggtggaactacttcggaccaattccacaaatattcccagaagaagtccaacagggattccaacaattcaacaagctctataatagcaaggaatcacgtattccaacagatctaaaatacttttccagttttgccttgtcatggattttttcatggcaatacagatacggaaaaactgaaaacagcaagcaatatccaccgttacagagacacgcctttgtaaaatggtggtcacaattcgatacttcaaaggctgctccagatcaagtcaagaactggttccagagcaatcctgagttccttaaacctgctgatccagagacatctctgttcctgaatcagaagtcgcaactggcagcattcttagcaagctcaaaatctaaagagagtcttgctcagaatctcaaagaagttctccaactagttcaacaggaagtggaagaagaaccttccaaaaaggaagctgaatcatcagagactaatgatgaccaagaagacgatccattctaccagaatgaagatgattgtttcggtatatcattagacgacgattaattagttgtagtaatcatgaattattataactaatttgtcagaatcttttaagaaatgtaatttgtaaa

SEQ ID NO: 16301 - DNA, 1069 bp, Glycine max
  Gm_smallRNAprecursor_9134
atttcaaaaaacaagtttttcaattttttacaaatggaaccagaatactgggacaagaatcccttcaaagcaaccgccaaagtattccccccaggattccattacaggccaatagccacaaacaaaacccgtaaattctacgaattcattctaatagatacgaactcagtatctattaaacacttcaaagaccccaaagatccaaatctaaatacccattccacaatccaaatcctaaaggttatgcagccacgacattatggctcaaacctaaaccaacccaaaaaattttctgctccatttaaccccgtaggatataattattgggattacatcgacgcctggaccaatgtgttctggcatcaaaatagtaaattcaagcattcatggctaatttactttaaaaataatactgtgtataattttccaaattggttcctccaatggtggaactacttcggaccaattccacaaatattcccagaagaagtccaacagggattccaacaattcaacaagctctataatagcaaggaatcacgtattccaacagatctaaaatacttttccagttttgccttgtcatggattttttcatggcaatacagatacggaaaaactgaaaacagcaagcaatatccaccgttacagagacacgcctttgtaaaatggtggtcacaattcgatacttcaaaggctgctccagatcaagtcaagaactggttccagagcaatcctgagttccttaaacctgctgatccagagacatctctgttcctgaatcagaagtcgcaactggcagcattcttagcaagctcaaaatctaaagagagtcttgctcagaatctcaaagaagttctccaactagttcaacaggaagtggaagaagaaccttccaaaaaggaagctgaatcatcagagactaatgatgaccaagaagacgatccattctaccagaatgaagatgattgtttcggtatatcattagacgacgattaattagttgtagtaatcatgaattattataactaatttgtcagaatcttttaagaaatgtaatttgtaaaag

SEQ ID NO: 16302 - DNA, 1049 bp, Glycine max
  Gm_smallRNAprecursor_9135
caattttttacaaatggaaccagaatactgggacaagaatcccttcaaagcaaccgccaaagtattccccccaggattccattacaggccaatagccacaaacaaaacccgtaaattctacgaattcattctaatagatacgaactcagtatctattaaacacttcaaagaccccaaagatccaaatctaaatacccattccacaatccaaatcctaaaggttatgcagccacgacattatggctcaaacctaaaccaacccaaaaaattttctgctccatttaaccccgtaggatataattattgggattacatcgacgcctggaccaatgtgttctggcatcaaaatagtaaattcaagcattcatggctaatttactttaaaaataatactgtgtataattttccaaattggttcctccaatggtggaactacttcggaccaattccacaaatattcccagaagaagtccaacagggattccaacaattcaacaagctctataatagcaaggaatcacgtattccaacagatctaaaatacttttccagttttgccttgtcatggattttttcatggcaatacagatacggaaaaactgaaaacagcaagcaatatccaccgttacagagacacgcctttgtaaaatggtggtcacaattcgatacttcaaaggctgctccagatcaagtcaagaactggttccagagcaatcctgagttccttaaacctgctgatccagagacatctctgttcctgaatcagaagtcgcaactggcagcattcttagcaagctcaaaatctaaagagagtcttgctcagaatctcaaagaagttctccaactagttcaacaggaagtggaagaagaaccttccaaaaaggaagctgaatcatcagagactaatgatgaccaagaagacgatccattctaccagaatgaagatgattgtttcggtatatcattagacgacgattaattagttgtagtaatcatgaattattataactaatttgtcagaatcttttaagaaatgtaatttgtaaaag

SEQ ID NO: 16303 - DNA, 1131 bp, Glycine max
  Gm_smallRNAprecursor_9136
caattttttacaaatggaaccagaatactgggacaagaatcccttcaaagcaaccgccaaagtattccccccaggattccattacaggccaatagccacaaacaaaacccgtaaattctacgaattcattctaatagatacgaactcagtatctattaaacacttcaaagaccccaaagatccaaatctaaatacccattccacaatccaaatcctaaaggttatgcagccacgacattatggctcaaacctaaaccaacccaaaaaattttctgctccatttaaccccgtaggatataattattgggattacatcgacgcctggaccaatgtgttctggcatcaaaatagtaaattcaagcattcatggctaatttactttaaaaataatactgtgtataattttccaaattggttcctccaatggtggaactacttcggaccaattccacaaatattcccagaagaagtccaacagggattccaacaattcaacaagctctataatagcaaggaatcacgtattccaacagatctaaaatacttttccagttttgccttgtcatggattttttcatggcaatacagatacggaaaaactgaaaacagcaagcaatatccaccgttacagagacacgcctttgtaaaatggtggtcacaattcgatacttcaaaggctgctccagatcaagtcaagaactggttccagagcaatcctgagttccttaaacctgctgatccagagacatctctgttcctgaatcagaagtcgcaactggcagcattcttagcaagctcaaaatctaaagagagtcttgctcagaatctcaaagaagttctccaactagttcaacaggaagtggaagaagaaccttccaaaaaggaagctgaatcatcagagactaatgatgaccaagaagacgatccattctaccagaatgaagatgattgtttcggtatatcattagacgacgattaattagttgtagtaatcatgaattattataactaatttgtcagaatcttttaagaaatgtaatttgtaaaagttttgtaacagttccagtaaacattaccgacactgtagaaacagtaaaaattgagtctatttaaaggagtcctcgttccctt

SEQ ID NO: 16304 - DNA, 1131 bp, Glycine max; identical to SEQ ID NO: 16303
  Gm_smallRNAprecursor_9137

SEQ ID NO: 16305 - DNA, 1086 bp, Glycine max
  Gm_smallRNAprecursor_9138
caaagcaaccgccaaagtattccccccaggattccattacaggccaatagccacaaacaaaacccgtaaattctacgaattcattctaatagatacgaactcagtatctattaaacacttcaaagaccccaaagatccaaatctaaatacccattccacaatccaaatcctaaaggttatgcagccacgacattatggctcaaacctaaaccaacccaaaaaattttctgctccatttaaccccgtaggatataattattgggattacatcgacgcctggaccaatgtgttctggcatcaaaatagtaaattcaagcattcatggctaatttactttaaaaataatactgtgtataattttccaaattggttcctccaatggtggaactacttcggaccaattccacaaatattcccagaagaagtccaacagggattccaacaattcaacaagctctataatagcaaggaatcacgtattccaacagatctaaaatacttttccagttttgccttgtcatggattttttcatggcaatacagatacggaaaaactgaaaacagcaagcaatatccaccgttacagagacacgcctttgtaaaatggtggtcacaattcgatacttcaaaggctgctccagatcaagtcaagaactggttccagagcaatcctgagttccttaaacctgctgatccagagacatctctgttcctgaatcagaagtcgcaactggcagcattcttagcaagctcaaaatctaaagagagtcttgctcagaatctcaaagaagttctccaactagttcaacaggaagtggaagaagaaccttccaaaaaggaagctgaatcatcagagactaatgatgaccaagaagacgatccattctaccagaatgaagatgattgtttcggtatatcattagacgacgattaattagttgtagtaatcatgaattattataactaatttgtcagaatcttttaagaaatgtaatttgtaaaagttttgtaacagttccagtaaacattaccgacactgtagaaacagtaaaaattgagtctatttaaaggagtcctcgttccctt

SEQ ID NO: 16306 - DNA, 1086 bp, Glycine max; identical to SEQ ID NO: 16305
  Gm_smallRNAprecursor_9139

SEQ ID NO: 16307 - DNA, 1085 bp, Glycine max
  Gm_smallRNAprecursor_9140
aaagcaaccgccaaagtattccccccaggattccattacaggccaatagccacaaacaaaacccgtaaattctacgaattcattctaatagatacgaactcagtatctattaaacacttcaaagaccccaaagatccaaatctaaatacccattccacaatccaaatcctaaaggttatgcagccacgacattatggctcaaacctaaaccaacccaaaaaattttctgctccatttaaccccgtaggatataattattgggattacatcgacgcctggaccaatgtgttctggcatcaaaatagtaaattcaagcattcatggctaatttactttaaaaataatactgtgtataattttccaaattggttcctccaatggtggaactacttcggaccaattccacaaatattcccagaagaagtccaacagggattccaacaattcaacaagctctataatagcaaggaatcacgtattccaacagatctaaaatacttttccagttttgccttgtcatggattttttcatggcaatacagatacggaaaaactgaaaacagcaagcaatatccaccgttacagagacacgcctttgtaaaatggtggtcacaattcgatacttcaaaggctgctccagatcaagtcaagaactggttccagagcaatcctgagttccttaaacctgctgatccagagacatctctgttcctgaatcagaagtcgcaactggcagcattcttagcaagctcaaaatctaaagagagtcttgctcagaatctcaaagaagttctccaactagttcaacaggaagtggaagaagaaccttccaaaaaggaagctgaatcatcagagactaatgatgaccaagaagacgatccattctaccagaatgaagatgattgtttcggtatatcattagacgacgattaattagttgtagtaatcatgaattattataactaatttgtcagaatcttttaagaaatgtaatttgtaaaagttttgtaacagttccagtaaacattaccgacactgtagaaacagtaaaaattgagtctatttaaaggagtcctcgttccctt

SEQ ID NO: 16308 - DNA, 1085 bp, Glycine max; identical to SEQ ID NO: 16307
  Gm_smallRNAprecursor_9141

SEQ ID NO: 16309 - DNA, 1149 bp, Glycine max
  Gm_smallRNAprecursor_9142
agcaaccgccaaagtattccccccaggattccattacaggccaatagccacaaacaaaacccgtaaattctacgaattcattctaatagatacgaactcagtatctattaaacacttcaaagaccccaaagatccaaatctaaatacccattccacaatccaaatcctaaaggttatgcagccacgacattatggctcaaacctaaaccaacccaaaaaattttctgctccatttaaccccgtaggatataattattgggattacatcgacgcctggaccaatgtgttctggcatcaaaatagtaaattcaagcattcatggctaatttactttaaaaataatactgtgtataattttccaaattggttcctccaatggtggaactacttcggaccaattccacaaatattcccagaagaagtccaacagggattccaacaattcaacaagctctataatagcaaggaatcacgtattccaacagatctaaaatacttttccagttttgccttgtcatggattttttcatggcaatacagatacggaaaaactgaaaacagcaagcaatatccaccgttacagagacacgcctttgtaaaatggtggtcacaattcgatacttcaaaggctgctccagatcaagtcaagaactggttccagagcaatcctgagttccttaaacctgctgatccagagacatctctgttcctgaatcagaagtcgcaactggcagcattcttagcaagctcaaaatctaaagagagtcttgctcagaatctcaaagaagttctccaactagttcaacaggaagtggaagaagaaccttccaaaaaggaagctgaatcatcagagactaatgatgaccaagaagacgatccattctaccagaatgaagatgattgtttcggtatatcattagacgacgattaattagttgtagtaatcatgaattattataactaatttgtcagaatcttttaagaaatgtaatttgtaaaagttttgtaacagttccagtaaacattaccgacactgtagaaacagtaaaaattgagtctatttaaaggagtcctcgttccctttgtgaggcacccttcagatagtctcagaatcaggtttttagagagagaagctctgcctagggaaaa

SEQ ID NO: 16310 - DNA, 1165 bp, Glycine max
  Gm_smallRNAprecursor_9143
ctaatagatacgaactcagtatctattaaacacttcaaagaccccaaagatccaaatctaaatacccattccacaatccaaatcctaaaggttatgcagccacgacattatggctcaaacctaaaccaacccaaaaaattttctgctccatttaaccccgtaggatataattattgggattacatcgacgcctggaccaatgtgttctggcatcaaaatagtaaattcaagcattcatggctaatttactttaaaaataatactgtgtataattttccaaattggttcctccaatggtggaactacttcggaccaattccacaaatattcccagaagaagtccaacagggattccaacaattcaacaagctctataatagcaaggaatcacgtattccaacagatctaaaatacttttccagttttgccttgtcatggattttttcatggcaatacagatacggaaaaactgaaaacagcaagcaatatccaccgttacagagacacgcctttgtaaaatggtggtcacaattcgatacttcaaaggctgctccagatcaagtcaagaactggttccagagcaatcctgagttccttaaacctgctgatccagagacatctctgttcctgaatcagaagtcgcaactggcagcattcttagcaagctcaaaatctaaagagagtcttgctcagaatctcaaagaagttctccaactagttcaacaggaagtggaagaagaaccttccaaaaaggaagctgaatcatcagagactaatgatgaccaagaagacgatccattctaccagaatgaagatgattgtttcggtatatcattagacgacgattaattagttgtagtaatcatgaattattataactaatttgtcagaatcttttaagaaatgtaatttgtaaaagttttgtaacagttccagtaaacattaccgacactgtagaaacagtaaaaattgagtctatttaaaggagtcctcgttccctttgtgaggcacccttcagatagtctcagaatcaggtttttagagagagaagctctgcctagggaaaaactctttgtaagcttttctttcggtttcaataaatttcaagttctgtttttcatatctcccttctcccctcaccgatcctgtgcggctctgccgccgc

SEQ ID NO: 16311 - DNA, 1086 bp, Glycine max
  Gm_smallRNAprecursor_9144
taaatacccattccacaatccaaatcctaaaggttatgcagccacgacattatggctcaaacctaaaccaacccaaaaaattttctgctccatttaaccccgtaggatataattattgggattacatcgacgcctggaccaatgtgttctggcatcaaaatagtaaattcaagcattcatggctaatttactttaaaaataatactgtgtataattttccaaattggttcctccaatggtggaactacttcggaccaattccacaaatattcccagaagaagtccaacagggattccaacaattcaacaagctctataatagcaaggaatcacgtattccaacagatctaaaatacttttccagttttgccttgtcatggattttttcatggcaatacagatacggaaaaactgaaaacagcaagcaatatccaccgttacagagacacgcctttgtaaaatggtggtcacaattcgatacttcaaaggctgctccagatcaagtcaagaactggttccagagcaatcctgagttccttaaacctgctgatccagagacatctctgttcctgaatcagaagtcgcaactggcagcattcttagcaagctcaaaatctaaagagagtcttgctcagaatctcaaagaagttctccaactagttcaacaggaagtggaagaagaaccttccaaaaaggaagctgaatcatcagagactaatgatgaccaagaagacgatccattctaccagaatgaagatgattgtttcggtatatcattagacgacgattaattagttgtagtaatcatgaattattataactaatttgtcagaatcttttaagaaatgtaatttgtaaaagttttgtaacagttccagtaaacattaccgacactgtagaaacagtaaaaattgagtctatttaaaggagtcctcgttccctttgtgaggcacccttcagatagtctcagaatcaggtttttagagagagaagctctgcctagggaaaaactctttgtaagcttttctttcggtttcaataaatttcaagttctgtttttcatatctcccttctcccctcaccgat

SEQ ID NO: 16312 - DNA, 1137 bp, Glycine max
  Gm_smallRNAprecursor_9145
taaatacccattccacaatccaaatcctaaaggttatgcagccacgacattatggctcaaacctaaaccaacccaaaaaattttctgctccatttaaccccgtaggatataattattgggattacatcgacgcctggaccaatgtgttctggcatcaaaatagtaaattcaagcattcatggctaatttactttaaaaataatactgtgtataattttccaaattggttcctccaatggtggaactacttcggaccaattccacaaatattcccagaagaagtccaacagggattccaacaattcaacaagctctataatagcaaggaatcacgtattccaacagatctaaaatacttttccagttttgccttgtcatggattttttcatggcaatacagatacggaaaaactgaaaacagcaagcaatatccaccgttacagagacacgcctttgtaaaatggtggtcacaattcgatacttcaaaggctgctccagatcaagtcaagaactggttccagagcaatcctgagttccttaaacctgctgatccagagacatctctgttcctgaatcagaagtcgcaactggcagcattcttagcaagctcaaaatctaaagagagtcttgctcagaatctcaaagaagttctccaactagttcaacaggaagtggaagaagaaccttccaaaaaggaagctgaatcatcagagactaatgatgaccaagaagacgatccattctaccagaatgaagatgattgtttcggtatatcattagacgacgattaattagttgtagtaatcatgaattattataactaatttgtcagaatcttttaagaaatgtaatttgtaaaagttttgtaacagttccagtaaacattaccgacactgtagaaacagtaaaaattgagtctatttaaaggagtcctcgttccctttgtgaggcacccttcagatagtctcagaatcaggtttttagagagagaagctctgcctagggaaaaactctttgtaagcttttctttcggtttcaataaatttcaagttctgtttttcatatctcccttctcccctcaccgatcctgtgcggctctgccgccgcttcggtttctttgttttcaaaaacctgggt

SEQ ID NO: 16313 - DNA, 1121 bp, Glycine max
  Gm_smallRNAprecursor_9146
cattccacaatccaaatcctaaaggttatgcagccacgacattatggctcaaacctaaaccaacccaaaaaattttctgctccatttaaccccgtaggatataattattgggattacatcgacgcctggaccaatgtgttctggcatcaaaatagtaaattcaagcattcatggctaatttactttaaaaataatactgtgtataattttccaaattggttcctccaatggtggaactacttcggaccaattccacaaatattcccagaagaagtccaacagggattccaacaattcaacaagctctataatagcaaggaatcacgtattccaacagatctaaaatacttttccagttttgccttgtcatggattttttcatggcaatacagatacggaaaaactgaaaacagcaagcaatatccaccgttacagagacacgcctttgtaaaatggtggtcacaattcgatacttcaaaggctgctccagatcaagtcaagaactggttccagagcaatcctgagttccttaaacctgctgatccagagacatctctgttcctgaatcagaagtcgcaactggcagcattcttagcaagctcaaaatctaaagagagtcttgctcagaatctcaaagaagttctccaactagttcaacaggaagtggaagaagaaccttccaaaaaggaagctgaatcatcagagactaatgatgaccaagaagacgatccattctaccagaatgaagatgattgtttcggtatatcattagacgacgattaattagttgtagtaatcatgaattattataactaatttgtcagaatcttttaagaaatgtaatttgtaaaagttttgtaacagttccagtaaacattaccgacactgtagaaacagtaaaaattgagtctatttaaaggagtcctcgttccctttgtgaggcacccttcagatagtctcagaatcaggtttttagagagagaagctctgcctagggaaaaactctttgtaagcttttctttcggtttcaataaatttcaagttctgtttttcatatctcccttctcccctcaccgatcctgtgcggctctgccgccgcttcggtttctttgttttcaaaa

SEQ ID NO: 16314 - DNA, 1080 bp, Glycine max
  Gm_smallRNAprecursor_9147
attccacaatccaaatcctaaaggttatgcagccacgacattatggctcaaacctaaaccaacccaaaaaattttctgctccatttaaccccgtaggatataattattgggattacatcgacgcctggaccaatgtgttctggcatcaaaatagtaaattcaagcattcatggctaatttactttaaaaataatactgtgtataattttccaaattggttcctccaatggtggaactacttcggaccaattccacaaatattcccagaagaagtccaacagggattccaacaattcaacaagctctataatagcaaggaatcacgtattccaacagatctaaaatacttttccagttttgccttgtcatggattttttcatggcaatacagatacggaaaaactgaaaacagcaagcaatatccaccgttacagagacacgcctttgtaaaatggtggtcacaattcgatacttcaaaggctgctccagatcaagtcaagaactggttccagagcaatcctgagttccttaaacctgctgatccagagacatctctgttcctgaatcagaagtcgcaactggcagcattcttagcaagctcaaaatctaaagagagtcttgctcagaatctcaaagaagttctccaactagttcaacaggaagtggaagaagaaccttccaaaaaggaagctgaatcatcagagactaatgatgaccaagaagacgatccattctaccagaatgaagatgattgtttcggtatatcattagacgacgattaattagttgtagtaatcatgaattattataactaatttgtcagaatcttttaagaaatgtaatttgtaaaagttttgtaacagttccagtaaacattaccgacactgtagaaacagtaaaaattgagtctatttaaaggagtcctcgttccctttgtgaggcacccttcagatagtctcagaatcaggtttttagagagagaagctctgcctagggaaaaactctttgtaagcttttctttcggtttcaataaatttcaagttctgtttttcatatctcccttctcccctcaccgatcct

SEQ ID NO: 16315 - DNA, 1098 bp, Glycine max
  Gm_smallRNAprecursor_9148
attccacaatccaaatcctaaaggttatgcagccacgacattatggctcaaacctaaaccaacccaaaaaattttctgctccatttaaccccgtaggatataattattgggattacatcgacgcctggaccaatgtgttctggcatcaaaatagtaaattcaagcattcatggctaatttactttaaaaataatactgtgtataattttccaaattggttcctccaatggtggaactacttcggaccaattccacaaatattcccagaagaagtccaacagggattccaacaattcaacaagctctataatagcaaggaatcacgtattccaacagatctaaaatacttttccagttttgccttgtcatggattttttcatggcaatacagatacggaaaaactgaaaacagcaagcaatatccaccgttacagagacacgcctttgtaaaatggtggtcacaattcgatacttcaaaggctgctccagatcaagtcaagaactggttccagagcaatcctgagttccttaaacctgctgatccagagacatctctgttcctgaatcagaagtcgcaactggcagcattcttagcaagctcaaaatctaaagagagtcttgctcagaatctcaaagaagttctccaactagttcaacaggaagtggaagaagaaccttccaaaaaggaagctgaatcatcagagactaatgatgaccaagaagacgatccattctaccagaatgaagatgattgtttcggtatatcattagacgacgattaattagttgtagtaatcatgaattattataactaatttgtcagaatcttttaagaaatgtaatttgtaaaagttttgtaacagttccagtaaacattaccgacactgtagaaacagtaaaaattgagtctatttaaaggagtcctcgttccctttgtgaggcacccttcagatagtctcagaatcaggtttttagagagagaagctctgcctagggaaaaactctttgtaagcttttctttcggtttcaataaatttcaagttctgtttttcatatctcccttctcccctcaccgatcctgtgcggctctgccgccgc

SEQ ID NO: 16316 - DNA, 1120 bp, Glycine max
  Gm_smallRNAprecursor_9149
attccacaatccaaatcctaaaggttatgcagccacgacattatggctcaaacctaaaccaacccaaaaaattttctgctccatttaaccccgtaggatataattattgggattacatcgacgcctggaccaatgtgttctggcatcaaaatagtaaattcaagcattcatggctaatttactttaaaaataatactgtgtataattttccaaattggttcctccaatggtggaactacttcggaccaattccacaaatattcccagaagaagtccaacagggattccaacaattcaacaagctctataatagcaaggaatcacgtattccaacagatctaaaatacttttccagttttgccttgtcatggattttttcatggcaatacagatacggaaaaactgaaaacagcaagcaatatccaccgttacagagacacgcctttgtaaaatggtggtcacaattcgatacttcaaaggctgctccagatcaagtcaagaactggttccagagcaatcctgagttccttaaacctgctgatccagagacatctctgttcctgaatcagaagtcgcaactggcagcattcttagcaagctcaaaatctaaagagagtcttgctcagaatctcaaagaagttctccaactagttcaacaggaagtggaagaagaaccttccaaaaaggaagctgaatcatcagagactaatgatgaccaagaagacgatccattctaccagaatgaagatgattgtttcggtatatcattagacgacgattaattagttgtagtaatcatgaattattataactaatttgtcagaatcttttaagaaatgtaatttgtaaaagttttgtaacagttccagtaaacattaccgacactgtagaaacagtaaaaattgagtctatttaaaggagtcctcgttccctttgtgaggcacccttcagatagtctcagaatcaggtttttagagagagaagctctgcctagggaaaaactctttgtaagcttttctttcggtttcaataaatttcaagttctgtttttcatatctcccttctcccctcaccgatcctgtgcggctctgccgccgcttcggtttctttgttttcaaaa

SEQ ID NO: 16317 - DNA, 1041 bp, Glycine max
  Gm_smallRNAprecursor_9150
tgctccatttaaccccgtaggatataattattgggattacatcgacgcctggaccaatgtgttctggcatcaaaatagtaaattcaagcattcatggctaatttactttaaaaataatactgtgtataattttccaaattggttcctccaatggtggaactacttcggaccaattccacaaatattcccagaagaagtccaacagggattccaacaattcaacaagctctataatagcaaggaatcacgtattccaacagatctaaaatacttttccagttttgccttgtcatggattttttcatggcaatacagatacggaaaaactgaaaacagcaagcaatatccaccgttacagagacacgcctttgtaaaatggtggtcacaattcgatacttcaaaggctgctccagatcaagtcaagaactggttccagagcaatcctgagttccttaaacctgctgatccagagacatctctgttcctgaatcagaagtcgcaactggcagcattcttagcaagctcaaaatctaaagagagtcttgctcagaatctcaaagaagttctccaactagttcaacaggaagtggaagaagaaccttccaaaaaggaagctgaatcatcagagactaatgatgaccaagaagacgatccattctaccagaatgaagatgattgtttcggtatatcattagacgacgattaattagttgtagtaatcatgaattattataactaatttgtcagaatcttttaagaaatgtaatttgtaaaagttttgtaacagttccagtaaacattaccgacactgtagaaacagtaaaaattgagtctatttaaaggagtcctcgttccctttgtgaggcacccttcagatagtctcagaatcaggtttttagagagagaagctctgcctagggaaaaactctttgtaagcttttctttcggtttcaataaatttcaagttctgtttttcatatctcccttctcccctcaccgatcctgtgcggctctgccgccgcttcggtttctttgttttca

SEQ ID NO: 16318 - DNA, 1157 bp, Glycine max
  Gm_smallRNAprecursor_9151
atatgttacaaattatggattggaactaaagtcttgtatagtacacgtaatattttactttgatttgtacagtaagtgtttgaacagtacttcctggaagtacagcagtctaatattttagttgaatggtactgtagcagtaagacccgtgttggataaagggcggtaaggctaaggtgtactatttaaccaaaatatcaagacataatacactggtggctataggattgccgttcaaactgtttttttttttttaaaaaagagtttttcttaaaaataatccagatccagaaaaattttgtgacatatttacttacggagatattcctatggaaccacatgagggcaaagatattagagaatattataatcatgtctagactattacgatctttttcccgtatctcttttcgctcaaactcctcctcatcatcttcttcaagaaactccaatttattaaatgatcaagacaaccagacccaagaggtcgccccaaaacacaatctcttcgatgaggaagtccggttcgaagatatcaatcaaaacatggatgactggaacattccagaaatccctcaggatcaactatacgttcctgaaacaataaaagacaaacacaactttgattacataatcaaaacagtagaaaacaatattcctctaggacaagatataggggaagaatttcatttgctttaaaaaaattcaatttatgaacatagccgtaagtataaatatctacacatcggttgtgtacaagtagccatcaagcccttaattgatatgggcatagatgcagcagttttaatgtgtctaagagacattaggcataatcaatttgaagactccctaattggaacagtcgaaaccagcctaggacaaggtccaatatattttaactgttatccaaacaaaacagtgagtctgatggacagaaacattcttgactctctgttcttaaacatccactttcatggcctagacatgaaagaaggatcaatcccagcagccttaatttataggatccagtataaggtcatgaatacttgtgcatctagagtcctgttaaaacctcaaaaaggagaaacaaccttgtttatcactgatatgacaaaggctaacgtttctctcccgagataaataaaatgggatgaggt

SEQ ID NO: 16319 - DNA, 1033 bp, Glycine max
  Gm_smallRNAprecursor_9152
ctaaggtgtactatttaaccaaaatatcaagacataatacactggtggctataggattgccgttcaaactgtttttttttttttaaaaaagagtttttcttaaaaataatccagatccagaaaaattttgtgacatatttacttacggagatattcctatggaaccacatgagggcaaagatattagagaatattataatcatgtctagactattacgatctttttcccgtatctcttttcgctcaaactcctcctcatcatcttcttcaagaaactccaatttattaaatgatcaagacaaccagacccaagaggtcgccccaaaacacaatctcttcgatgaggaagtccggttcgaagatatcaatcaaaacatggatgactggaacattccagaaatccctcaggatcaactatacgttcctgaaacaataaaagacaaacacaactttgattacataatcaaaacagtagaaaacaatattcctctaggacaagatataggggaagaatttcatttgctttaaaaaaattcaatttatgaacatagccgtaagtataaatatctacacatcggttgtgtacaagtagccatcaagcccttaattgatatgggcatagatgcagcagttttaatgtgtctaagagacattaggcataatcaatttgaagactccctaattggaacagtcgaaaccagcctaggacaaggtccaatatattttaactgttatccaaacaaaacagtgagtctgatggacagaaacattcttgactctctgttcttaaacatccactttcatggcctagacatgaaagaaggatcaatcccagcagccttaatttataggatccagtataaggtcatgaatacttgtgcatctagagtcctgttaaaacctcaaaaaggagaaacaaccttgtttatcactgatatgacaaaggctaacgtttctctcccgagataaataaaatgggatgaggtaactcttcccgaaagatgggttatggataaggcaacaccgtctattc

SEQ ID NO: 16320 - DNA, 1047 bp, Glycine max
  Gm_smallRNAprecursor_9153
cataatacactggtggctataggattgccgttcaaactgtttttttttttttaaaaaagagtttttcttaaaaataatccagatccagaaaaattttgtgacatatttacttacggagatattcctatggaaccacatgagggcaaagatattagagaatattataatcatgtctagactattacgatctttttcccgtatctcttttcgctcaaactcctcctcatcatcttcttcaagaaactccaatttattaaatgatcaagacaaccagacccaagaggtcgccccaaaacacaatctcttcgatgaggaagtccggttcgaagatatcaatcaaaacatggatgactggaacattccagaaatccctcaggatcaactatacgttcctgaaacaataaaagacaaacacaactttgattacataatcaaaacagtagaaaacaatattcctctaggacaagatataggggaagaatttcatttgctttaaaaaaattcaatttatgaacatagccgtaagtataaatatctacacatcggttgtgtacaagtagccatcaagcccttaattgatatgggcatagatgcagcagttttaatgtgtctaagagacattaggcataatcaatttgaagactccctaattggaacagtcgaaaccagcctaggacaaggtccaatatattttaactgttatccaaacaaaacagtgagtctgatggacagaaacattcttgactctctgttcttaaacatccactttcatggcctagacatgaaagaaggatcaatcccagcagccttaatttataggatccagtataaggtcatgaatacttgtgcatctagagtcctgttaaaacctcaaaaaggagaaacaaccttgtttatcactgatatgacaaaggctaacgtttctctcccgagataaataaaatgggatgaggtaactcttcccgaaagatgggttatggataaggcaacaccgtctattccccgacccgctccgaccatagaacatatcaagcaagataactccgg

SEQ ID NO: 16321 - DNA, 1150 bp, Glycine max
  Gm_smallRNAprecursor_9154
aaccttgcctcaaaacagatttttgcaagatggcaagcaattttgagtgtctttgattttaatatagaatatatcaagggctcttccaactctctacctgactacctcacccgtgaatttttacagaaaattcccgatgcctcctaaggtgtctagttcctctggcagaggaggaagatccagtacaaaaggaaaagaggttctactggctctaccagagccaataaccaaaaaggcaactgcaacatcttctgggtcacctacccagactgggtcatcaacccagaaaggaaagattgaagggtcattgacccagataactaccgccaaacctgagtcatcaactcaggaatccccaaaaccaacaacaaccaaacagactgtggctgactatgcctggtccatacaaactctattggccttagaagatataggcctcaccaaaataccaaaattggccaaaaagacctgggtagaaatggcctcagaatcagacgatgattctgaaacagatctgcaaaaacaaatccaaaaggccaaacagaccaaaactgtctgcaaccaaagaccaagccaatcgttgactcaacaagaatcaacatcacaacccagcagcagttatatttcaaaaaacaagtttttcaattttttacaaatggaaccagaatactgggacaagaatcccttcaaagcaaccgccaaagtattccccccaggattccattacaggccaatagccacaaacaaaacccgtaaattctacgaattcattctaatagatacgaactcagtatctattaaacacttcaaagaccccaaagatccaaatctaaatacccattccacaatccaaatcctaaaggttatgcagccacgacattatggctcaaacctaaaccaacccaaaaaattttctgctccatttaaccccgtaggatataattattgggattacatcgacgcctggaccaatgtgttctggcatcaaaatagtaaattcaagcattcatggctaatttactttaaaaataatactgtgtataattttccaaattggttcctccaatggtggaactacttcggaccaattccacaaatattcccagaagaagtccaacagggattccaacaattcaacaagctctataat

SEQ ID NO: 16322 - DNA, 1148 bp, Glycine max
  Gm_smallRNAprecursor_9155
accttgcctcaaaacagatttttgcaagatggcaagcaattttgagtgtctttgattttaatatagaatatatcaagggctcttccaactctctacctgactacctcacccgtgaatttttacagaaaattcccgatgcctcctaaggtgtctagttcctctggcagaggaggaagatccagtacaaaaggaaaagaggttctactggctctaccagagccaataaccaaaaaggcaactgcaacatcttctgggtcacctacccagactgggtcatcaacccagaaaggaaagattgaagggtcattgacccagataactaccgccaaacctgagtcatcaactcaggaatccccaaaaccaacaacaaccaaacagactgtggctgactatgcctggtccatacaaactctattggccttagaagatataggcctcaccaaaataccaaaattggccaaaaagacctgggtagaaatggcctcagaatcagacgatgattctgaaacagatctgcaaaaacaaatccaaaaggccaaacagaccaaaactgtctgcaaccaaagaccaagccaatcgttgactcaacaagaatcaacatcacaacccagcagcagttatatttcaaaaaacaagtttttcaattttttacaaatggaaccagaatactgggacaagaatcccttcaaagcaaccgccaaagtattccccccaggattccattacaggccaatagccacaaacaaaacccgtaaattctacgaattcattctaatagatacgaactcagtatctattaaacacttcaaagaccccaaagatccaaatctaaatacccattccacaatccaaatcctaaaggttatgcagccacgacattatggctcaaacctaaaccaacccaaaaaattttctgctccatttaaccccgtaggatataattattgggattacatcgacgcctggaccaatgtgttctggcatcaaaatagtaaattcaagcattcatggctaatttactttaaaaataatactgtgtataattttccaaattggttcctccaatggtggaactacttcggaccaattccacaaatattcccagaagaagtccaacagggattccaacaattcaacaagctctataa

SEQ ID NO: 16323 - DNA, 1149 bp, Glycine max
  Gm_smallRNAprecursor_9156
accttgcctcaaaacagatttttgcaagatggcaagcaattttgagtgtctttgattttaatatagaatatatcaagggctcttccaactctctacctgactacctcacccgtgaatttttacagaaaattcccgatgcctcctaaggtgtctagttcctctggcagaggaggaagatccagtacaaaaggaaaagaggttctactggctctaccagagccaataaccaaaaaggcaactgcaacatcttctgggtcacctacccagactgggtcatcaacccagaaaggaaagattgaagggtcattgacccagataactaccgccaaacctgagtcatcaactcaggaatccccaaaaccaacaacaaccaaacagactgtggctgactatgcctggtccatacaaactctattggccttagaagatataggcctcaccaaaataccaaaattggccaaaaagacctgggtagaaatggcctcagaatcagacgatgattctgaaacagatctgcaaaaacaaatccaaaaggccaaacagaccaaaactgtctgcaaccaaagaccaagccaatcgttgactcaacaagaatcaacatcacaacccagcagcagttatatttcaaaaaacaagtttttcaattttttacaaatggaaccagaatactgggacaagaatcccttcaaagcaaccgccaaagtattccccccaggattccattacaggccaatagccacaaacaaaacccgtaaattctacgaattcattctaatagatacgaactcagtatctattaaacacttcaaagaccccaaagatccaaatctaaatacccattccacaatccaaatcctaaaggttatgcagccacgacattatggctcaaacctaaaccaacccaaaaaattttctgctccatttaaccccgtaggatataattattgggattacatcgacgcctggaccaatgtgttctggcatcaaaatagtaaattcaagcattcatggctaatttactttaaaaataatactgtgtataattttccaaattggttcctccaatggtggaactacttcggaccaattccacaaatattcccagaagaagtccaacagggattccaacaattcaacaagctctataat

SEQ ID NO: 16324 - DNA, 1124 bp, Glycine max
  Gm_smallRNAprecursor_9157
attccacaatccaaatcctaaaggttatgcagccacgacattatggctcaaacctaaaccaacccaaaaaattttctgctccatttaaccccgtaggatataattattgggattacatcgacgcctggaccaatgtgttctggcatcaaaatagtaaattcaagcattcatggctaatttactttaaaaataatactgtgtataattttccaaattggttcctccaatggtggaactacttcggaccaattccacaaatattcccagaagaagtccaacagggattccaacaattcaacaagctctataatagcaaggaatcacgtattccaacagatctaaaatacttttccagttttgccttgtcatggattttttcatggcaatacagatacggaaaaactgaaaacagcaagcaatatccaccgttacagagacacgcctttgtaaaatggtggtcacaattcgatacttcaaaggctgctccagatcaagtcaagaactggttccagagcaatcctgagttccttaaacctgctgatccagagacatctctgttcctgaatcagaagtcgcaactggcagcattcttagcaagctcaaaatctaaagagagtcttgctcagaatctcaaagaagttctccaactagttcaacaggaagtggaagaagaaccttccaaaaaggaagctgaatcatcagagactaatgatgaccaagaagacgatccattctaccagaatgaagatgattgtttcggtatatcattagacgacgattaattagttgtagtaatcatgaattattataactaatttgtcagaatcttttaagaaatgtaatttgtaaaagttttgtaacagttccagtaaacattaccgacactgtagaaacagtaaaaattgagtctatttaaaggagtcctcgttccctttgtgaggcacccttcagatagtctcagaatcaggtttttagagagagaagctctgcctagggaaaaactctttgtaagcttttctttcggtttcaataaatttcaagttctgtttttcatatctcccttctcccctcaccgatcctgtgcggctctgccgccgcttcggtttctttgttttcaaaaacct

SEQ ID NO: 16325 - DNA, 1123 bp, Glycine max
  Gm_smallRNAprecursor_9158
ttccacaatccaaatcctaaaggttatgcagccacgacattatggctcaaacctaaaccaacccaaaaaattttctgctccatttaaccccgtaggatataattattgggattacatcgacgcctggaccaatgtgttctggcatcaaaatagtaaattcaagcattcatggctaatttactttaaaaataatactgtgtataattttccaaattggttcctccaatggtggaactacttcggaccaattccacaaatattcccagaagaagtccaacagggattccaacaattcaacaagctctataatagcaaggaatcacgtattccaacagatctaaaatacttttccagttttgccttgtcatggattttttcatggcaatacagatacggaaaaactgaaaacagcaagcaatatccaccgttacagagacacgcctttgtaaaatggtggtcacaattcgatacttcaaaggctgctccagatcaagtcaagaactggttccagagcaatcctgagttccttaaacctgctgatccagagacatctctgttcctgaatcagaagtcgcaactggcagcattcttagcaagctcaaaatctaaagagagtcttgctcagaatctcaaagaagttctccaactagttcaacaggaagtggaagaagaaccttccaaaaaggaagctgaatcatcagagactaatgatgaccaagaagacgatccattctaccagaatgaagatgattgtttcggtatatcattagacgacgattaattagttgtagtaatcatgaattattataactaatttgtcagaatcttttaagaaatgtaatttgtaaaagttttgtaacagttccagtaaacattaccgacactgtagaaacagtaaaaattgagtctatttaaaggagtcctcgttccctttgtgaggcacccttcagatagtctcagaatcaggtttttagagagagaagctctgcctagggaaaaactctttgtaagcttttctttcggtttcaataaatttcaagttctgtttttcatatctcccttctcccctcaccgatcctgtgcggctctgccgccgcttcggtttctttgttttcaaaaacct

SEQ ID NO: 16326 - DNA, 1089 bp, Glycine max
  Gm_smallRNAprecursor_9159
gtttgcacaattctagctccaatgaagtatcactagtgattatgagtagagtaatgaacattataatttaatttcttgacatcagttgatttaaggtaatggaaaattaattcacatacattttgcctttctaattaaaattattttaatctattgtaatttttattaaaaatttgtttagaattcaattttcttaatttgttgtaattaatagtaaaatttattttcttaatctattgtaattagtattaaaatttaatttaataattaatatttaaatgatagattaaatacaaataatacatatatctcttatttttatttaatctatcatttaaatatttatttattaaataaattttaccattaatattaattataatcatgctaatatatattatttttaattatttatatttttctgatgggatatcaaccagaaaaaatataaataattaaaagtaatattcaattcaaaaacggtgcttacatcagtaacgtcttagaatgcctactttcaaagacgttgttgaggtaagcaccatcttagaatgcgtactttcaaagacggtgcttacctcaacaatgtctttgaaagtaggcattcaaagacggtgattacttcagcaacgtcttagaatgcctacttttaaagacgttgttgaggtaagcaccgtctttgaaagttgctcactttcaaagacggtgttttgggacccgttgttgaaatttttaagcttcgacgacaccacattcaacggcgttcgaaaaacatcgttgtatcccctatttgaccgtcgtaaaatcgcttttttctagtagtgtttttgaggggaacatgtatgttgcttgttgttggttcatgcatagtgcaggggttcgtagcagttgtgtgagaccgctacgaaaacaaccaaccaaaataacacattccacagagcaagatgcatgcacaagtagctttatgatttgcacgcaaaaggaaagtatataaaagtcaccaagaaagaaatttggcttgctttttacaaccacaccttttttcacattggtgatcttccccctctttttctattcacaactttcttt

SEQ ID NO: 16327 - DNA, 1200 bp, Glycine max
  Gm_smallRNAprecursor_9160
ttgttcatcagcaacacaatgtacaaccatcagtcggtgtactcgaggttggcatgaccttcgatgacaaatcacaatgtattcgagcaatcaaagaatacaacatcagaaatcattttgattgcagaacaatttactctgaccaaagaaggctacacttcgtctgcaagttacatgaaaatggttgtacatggagcttgggcgcatgcaattcaaagaggcataacaaatggattatcaagagtatcagaggtcatcacacttgtctcgtgccgatgcttacacaagatcatcgccaactcgacaaacacgtcatagcacagatcatccaaccaattgtcaaaacaaacccaactgtctccatcaagacattgattgcagagattaaaacgttcatgaattataccccatcctacaagaagacatggttagcaaagcaaaaagcattggagatgattcatggaaactgggaagaatcatatgccaaactgccaaaacttttcggagctttgcaatcttgtgttcccgggactgtggtcgctgctcaaacagaatccttgtatgaggggggagaaatagtaccgggcaaaagattgtttaaacgtgtcttttggtcatttggtccatgcattaatggttttgcatattgcaaactcattgtacaagtagacggtacatggctttacggaaagtatactggcacactgttgatagctaccgcacaagatggagctaaccatatcttcccgattgcctatgccattgtagaaggggagacaacttcagcttgggggttttttctaaagaatttgagaagacatgttactccgcaaattaacatttctcttatttcagaccgacacccctcaattataagtgcctacaacaacccaagtaacttatgggtccaggacacatcccatttcttttgcctgcgccacattgcacaaaactttcttcgtggtaactcaaactgcaaacatttaaagaaaccacttatgttggctggtgagaatctattttatttattcgttataattttctttcaatcaaattttataacataatacattgattaaatatttacagggtacgcatacacagagaagatgcactggcgacatcttggggatattcgtgcgaataagccaagtgcagctgaatggcttgatcaattacccaaacaaaaatgggtacaat

SEQ ID NO: 16328 - DNA, 1076 bp, Glycine max
  Gm_smallRNAprecursor_9161
catcagcaacacaatgtacaaccatcagtcggtgtactcgaggttggcatgaccttcgatgacaaatcacaatgtattcgagcaatcaaagaatacaacatcagaaatcattttgattgcagaacaatttactctgaccaaagaaggctacacttcgtctgcaagttacatgaaaatggttgtacatggagcttgggcgcatgcaattcaaagaggcataacaaatggattatcaagagtatcagaggtcatcacacttgtctcgtgccgatgcttacacaagatcatcgccaactcgacaaacacgtcatagcacagatcatccaaccaattgtcaaaacaaacccaactgtctccatcaagacattgattgcagagattaaaacgttcatgaattataccccatcctacaagaagacatggttagcaaagcaaaaagcattggagatgattcatggaaactgggaagaatcatatgccaaactgccaaaacttttcggagctttgcaatcttgtgttcccgggactgtggtcgctgctcaaacagaatccttgtatgaggggggagaaatagtaccgggcaaaagattgtttaaacgtgtcttttggtcatttggtccatgcattaatggttttgcatattgcaaactcattgtacaagtagacggtacatggctttacggaaagtatactggcacactgttgatagctaccgcacaagatggagctaaccatatcttcccgattgcctatgccattgtagaaggggagacaacttcagcttgggggttttttctaaagaatttgagaagacatgttactccgcaaattaacatttctcttatttcagaccgacacccctcaattataagtgcctacaacaacccaagtaacttatgggtccaggacacatcccatttcttttgcctgcgccacattgcacaaaactttcttcgtggtaactcaaactgcaaacatttaaagaaaccacttatgttggctggtgagaatctattttatttattcgttataattttctttcaatcaaattttataacataatacattgattaaat

SEQ ID NO: 16329 - DNA, 1075 bp, Glycine max
  Gm_smallRNAprecursor_9162
atcagcaacacaatgtacaaccatcagtcggtgtactcgaggttggcatgaccttcgatgacaaatcacaatgtattcgagcaatcaaagaatacaacatcagaaatcattttgattgcagaacaatttactctgaccaaagaaggctacacttcgtctgcaagttacatgaaaatggttgtacatggagcttgggcgcatgcaattcaaagaggcataacaaatggattatcaagagtatcagaggtcatcacacttgtctcgtgccgatgcttacacaagatcatcgccaactcgacaaacacgtcatagcacagatcatccaaccaattgtcaaaacaaacccaactgtctccatcaagacattgattgcagagattaaaacgttcatgaattataccccatcctacaagaagacatggttagcaaagcaaaaagcattggagatgattcatggaaactgggaagaatcatatgccaaactgccaaaacttttcggagctttgcaatcttgtgttcccgggactgtggtcgctgctcaaacagaatccttgtatgaggggggagaaatagtaccgggcaaaagattgtttaaacgtgtcttttggtcatttggtccatgcattaatggttttgcatattgcaaactcattgtacaagtagacggtacatggctttacggaaagtatactggcacactgttgatagctaccgcacaagatggagctaaccatatcttcccgattgcctatgccattgtagaaggggagacaacttcagcttgggggttttttctaaagaatttgagaagacatgttactccgcaaattaacatttctcttatttcagaccgacacccctcaattataagtgcctacaacaacccaagtaacttatgggtccaggacacatcccatttcttttgcctgcgccacattgcacaaaactttcttcgtggtaactcaaactgcaaacatttaaagaaaccacttatgttggctggtgagaatctattttatttattcgttataattttctttcaatcaaattttataacataatacattgattaaat

SEQ ID NO: 16330 - DNA, 1066 bp, Glycine max
  Gm_smallRNAprecursor_9163
gcaacacaatgtacaaccatcagtcggtgtactcgaggttggcatgaccttcgatgacaaatcacaatgtattcgagcaatcaaagaatacaacatcagaaatcattttgattgcagaacaatttactctgaccaaagaaggctacacttcgtctgcaagttacatgaaaatggttgtacatggagcttgggcgcatgcaattcaaagaggcataacaaatggattatcaagagtatcagaggtcatcacacttgtctcgtgccgatgcttacacaagatcatcgccaactcgacaaacacgtcatagcacagatcatccaaccaattgtcaaaacaaacccaactgtctccatcaagacattgattgcagagattaaaacgttcatgaattataccccatcctacaagaagacatggttagcaaagcaaaaagcattggagatgattcatggaaactgggaagaatcatatgccaaactgccaaaacttttcggagctttgcaatcttgtgttcccgggactgtggtcgctgctcaaacagaatccttgtatgaggggggagaaatagtaccgggcaaaagattgtttaaacgtgtcttttggtcatttggtccatgcattaatggttttgcatattgcaaactcattgtacaagtagacggtacatggctttacggaaagtatactggcacactgttgatagctaccgcacaagatggagctaaccatatcttcccgattgcctatgccattgtagaaggggagacaacttcagcttgggggttttttctaaagaatttgagaagacatgttactccgcaaattaacatttctcttatttcagaccgacacccctcaattataagtgcctacaacaacccaagtaacttatgggtccaggacacatcccatttcttttgcctgcgccacattgcacaaaactttcttcgtggtaactcaaactgcaaacatttaaagaaaccacttatgttggctggtgagaatctattttatttattcgttataattttctttcaatcaaattttataacataatacattgat

SEQ ID NO: 16331 - DNA, 1067 bp, Glycine max
  Gm_smallRNAprecursor_9164
gcaacacaatgtacaaccatcagtcggtgtactcgaggttggcatgaccttcgatgacaaatcacaatgtattcgagcaatcaaagaatacaacatcagaaatcattttgattgcagaacaatttactctgaccaaagaaggctacacttcgtctgcaagttacatgaaaatggttgtacatggagcttgggcgcatgcaattcaaagaggcataacaaatggattatcaagagtatcagaggtcatcacacttgtctcgtgccgatgcttacacaagatcatcgccaactcgacaaacacgtcatagcacagatcatccaaccaattgtcaaaacaaacccaactgtctccatcaagacattgattgcagagattaaaacgttcatgaattataccccatcctacaagaagacatggttagcaaagcaaaaagcattggagatgattcatggaaactgggaagaatcatatgccaaactgccaaaacttttcggagctttgcaatcttgtgttcccgggactgtggtcgctgctcaaacagaatccttgtatgaggggggagaaatagtaccgggcaaaagattgtttaaacgtgtcttttggtcatttggtccatgcattaatggttttgcatattgcaaactcattgtacaagtagacggtacatggctttacggaaagtatactggcacactgttgatagctaccgcacaagatggagctaaccatatcttcccgattgcctatgccattgtagaaggggagacaacttcagcttgggggttttttctaaagaatttgagaagacatgttactccgcaaattaacatttctcttatttcagaccgacacccctcaattataagtgcctacaacaacccaagtaacttatgggtccaggacacatcccatttcttttgcctgcgccacattgcacaaaactttcttcgtggtaactcaaactgcaaacatttaaagaaaccacttatgttggctggtgagaatctattttatttattcgttataattttctttcaatcaaattttataacataatacattgatt

SEQ ID NO: 16332 - DNA, 1065 bp, Glycine max
  Gm_smallRNAprecursor_9165
caacacaatgtacaaccatcagtcggtgtactcgaggttggcatgaccttcgatgacaaatcacaatgtattcgagcaatcaaagaatacaacatcagaaatcattttgattgcagaacaatttactctgaccaaagaaggctacacttcgtctgcaagttacatgaaaatggttgtacatggagcttgggcgcatgcaattcaaagaggcataacaaatggattatcaagagtatcagaggtcatcacacttgtctcgtgccgatgcttacacaagatcatcgccaactcgacaaacacgtcatagcacagatcatccaaccaattgtcaaaacaaacccaactgtctccatcaagacattgattgcagagattaaaacgttcatgaattataccccatcctacaagaagacatggttagcaaagcaaaaagcattggagatgattcatggaaactgggaagaatcatatgccaaactgccaaaacttttcggagctttgcaatcttgtgttcccgggactgtggtcgctgctcaaacagaatccttgtatgaggggggagaaatagtaccgggcaaaagattgtttaaacgtgtcttttggtcatttggtccatgcattaatggttttgcatattgcaaactcattgtacaagtagacggtacatggctttacggaaagtatactggcacactgttgatagctaccgcacaagatggagctaaccatatcttcccgattgcctatgccattgtagaaggggagacaacttcagcttgggggttttttctaaagaatttgagaagacatgttactccgcaaattaacatttctcttatttcagaccgacacccctcaattataagtgcctacaacaacccaagtaacttatgggtccaggacacatcccatttcttttgcctgcgccacattgcacaaaactttcttcgtggtaactcaaactgcaaacatttaaagaaaccacttatgttggctggtgagaatctattttatttattcgttataattttctttcaatcaaattttataacataatacattgat

SEQ ID NO: 16333 - DNA, 1039 bp, Glycine max
  Gm_smallRNAprecursor_9166
agcaatcaaagaatacaacatcagaaatcattttgattgcagaacaatttactctgaccaaagaaggctacacttcgtctgcaagttacatgaaaatggttgtacatggagcttgggcgcatgcaattcaaagaggcataacaaatggattatcaagagtatcagaggtcatcacacttgtctcgtgccgatgcttacacaagatcatcgccaactcgacaaacacgtcatagcacagatcatccaaccaattgtcaaaacaaacccaactgtctccatcaagacattgattgcagagattaaaacgttcatgaattataccccatcctacaagaagacatggttagcaaagcaaaaagcattggagatgattcatggaaactgggaagaatcatatgccaaactgccaaaacttttcggagctttgcaatcttgtgttcccgggactgtggtcgctgctcaaacagaatccttgtatgaggggggagaaatagtaccgggcaaaagattgtttaaacgtgtcttttggtcatttggtccatgcattaatggttttgcatattgcaaactcattgtacaagtagacggtacatggctttacggaaagtatactggcacactgttgatagctaccgcacaagatggagctaaccatatcttcccgattgcctatgccattgtagaaggggagacaacttcagcttgggggttttttctaaagaatttgagaagacatgttactccgcaaattaacatttctcttatttcagaccgacacccctcaattataagtgcctacaacaacccaagtaacttatgggtccaggacacatcccatttcttttgcctgcgccacattgcacaaaactttcttcgtggtaactcaaactgcaaacatttaaagaaaccacttatgttggctggtgagaatctattttatttattcgttataattttctttcaatcaaattttataacataatacattgattaaatatttacagggtacgcatacacagagaagatgcactggcgacat

SEQ ID NO: 16334 - DNA, 1069 bp, Glycine max
  Gm_smallRNAprecursor_9167
tatttgtgagcatctatgtatggtattacctcagctgtgttgttaagtacatacaaatgcgcttgtgatagtttctggcgatccatggttacaacattgaatcctcgcgttcccctaccttgtcgtgtagcttcatgacgactttcaggaataccaacaggtgatgcatcttcgatgtaagtagagcaaaactcaatagcttcttctgccacgtacctttcaacaatgcttgcttctggcctatattgattcttcgtgtaacttttcaacaccttcatgtaccgctcaaccggatacatccaccgcaaatatacaggcccacacaaacgtatttctcgaacaagatgaacaagtaagtgaatcattatgtcaaaaaaagttgggggaaagtacatctccaattgacaaatgataatggcagcctcattttccaaatcatccaactgtttagggtcaatcactttgctacagattgcattaaagaaaaaacacaatcgagttattgcaaccctaactttgtcaggcaatattccacgaatggcaacaggcaataattgttgcatcaaaacgtgacaatcatgggacttcaaccccaccaatttcatttcatccactgatacaaggctcttgatatttgaagagtatccttgtgggactttgacatttttcagacaatgacaaaaactttttttctcatatgttgacatcgtatgacatgcgggcggcaaatacgttcgaagaccttttgacacaggatgcaactggtgtcgtactcccatttccactaaatcttgacgacatttcaaaccatcttttgtcttccctttaatgttaagcagtgtgccaaccaaactgtcacagacatttttttcaacatgcatcacatctaaacaatgtctcacatctaagttgcaccagtatggaagatcaaagaagatggaccttttcttccaaatgtttttgggagcgccatctttcttttgtgtcttcccatatatattgcaaatgttcttcacacgatcaaaaacttcaacacctgacaaaggaattgatgcactgtcattctcag

SEQ ID NO: 16335 - DNA, 1036 bp, Glycine max
  Gm_smallRNAprecursor_9168
tttggatattaattaaacgttaactacaattagtgtacacacacataaaatatatataagtagaacttttatttaaatcacgtaccttaacaacattccacctagcagcagccttggatttcggttgtggagtatcatcaagtcctttcaaagcactagtgttgaatatgaggaacattaaaatattgatgttgttgagttatgccaatgaaaatgtattgaaaacaatactgacctgttaattattcccttaaggtagttgtctggcctgttatgtaaagaacaaaaccagacaactaggttttctttaggcagaatgacgaccatttgccagtgtccgctgcagtagagacgaatatgggctattgtagtagtatagattatttaaattcaattattgtgtttgacttacccattcagataggctccaaggtaaacatctcgttttgaactctgtatccaactcttgatgtaactttcagattcaaattgtgattgcccagatctctgaatggactgtggctcgaggaatccatacacatcagaattccccgctcgcacacttgtctcggtcagatggctgtgttgttaagtcaaagttaattatgtatgaatttaaaacaattactttggtaattaatagtaatctaaaatgacttacagaatccacaactgtataacagatatgctgagacattgaccaccgtgtgcaatttcagagagatcttcatgctttatatacaacgggaagttttgattaaacaccctgaatatggtagcatcccacataacctggagcggcttcaaaaacagttgtgggatggtcaatgtcatcaggtacaggggatcgtcgacctcttcatccgggctttctagagattttgctggagacacagctgcctgttgataaaacatagttaattagcaagttttgattacagtgaacaaaataattgaaaaaaaataaacatataatcagagtaaaatacctgttctgataaacacttcacaagatgtgttggtcaagcaaggaagg

SEQ ID NO: 16336 - DNA, 1045 bp, Glycine max
  Gm_smallRNAprecursor_9169
gccgtcaacaccaatgggcgaggtctgcataaccattctcttttcctcttttttttcttcaattaccatcaatatatcatttcgggttctgattttttgtgtgtgtgttttgaataggaagagaaaaaaccagaggaaaacaaagtgaaggagaaaaaagcaaatgaagaagaaaagaaagaagaagagaaaaaaccagaggaatcaaaagatgacaaggaatccaaggaggaatctgcgccgccagaaatcgtgctaggcacaacctttgcaatgcatggacactttaagcacgatttctggcatcttttaagttaaggactattttgcaacacttatgcaaaagatagggactattttgaatttttcattaagttagggactaatatgcaacaagggtacaaagttagggactaaattacctatttactcattttgttatcatcaaatgatgtggcatcttttaggaggcacgtccacgtgtcatgccacatcatcctttagtgccacgttggatagttcacgtgacaccaaaattgacctcactaacggcgttactttaaaatttaacggaaatactattttgcaacacttttgcaaagatagggactattttgaatttaatattaagttagggactaatatgcaaaatgggtacaatctcagggactaaattgcctattcactctccttggaatatatgttttatggccaatgttcttctcaaaaatgatttttgcttcaatgatatgagcaccaagtcttgagatgataagcctagtaccattgcacaacccgtctttttgtgtcatattctgcagtaacataataagagtgccaaccttcaatttcattttgtgattaggtatcccagatgtgttaagtgagtttagaaattctggagtgattgtttcaaatgttggattttgaagtgcatctgatttgttgatactatcaacactataatattctttctcatctcaaggtatcaatgacatgacatactcatcgactttatcaataacttcaattgtagaggcaagta

SEQ ID NO: 16337 - DNA, 1045 bp, Glycine max; identical to SEQ ID NO: 16336
  Gm_smallRNAprecursor_9170

SEQ ID NO: 16338 - DNA, 1046 bp, Glycine max
  Gm_smallRNAprecursor_9171
gccgtcaacaccaatgggcgaggtctgcataaccattctcttttcctcttttttttcttcaattaccatcaatatatcatttcgggttctgattttttgtgtgtgtgttttgaataggaagagaaaaaaccagaggaaaacaaagtgaaggagaaaaaagcaaatgaagaagaaaagaaagaagaagagaaaaaaccagaggaatcaaaagatgacaaggaatccaaggaggaatctgcgccgccagaaatcgtgctaggcacaacctttgcaatgcatggacactttaagcacgatttctggcatcttttaagttaaggactattttgcaacacttatgcaaaagatagggactattttgaatttttcattaagttagggactaatatgcaacaagggtacaaagttagggactaaattacctatttactcattttgttatcatcaaatgatgtggcatcttttaggaggcacgtccacgtgtcatgccacatcatcctttagtgccacgttggatagttcacgtgacaccaaaattgacctcactaacggcgttactttaaaatttaacggaaatactattttgcaacacttttgcaaagatagggactattttgaatttaatattaagttagggactaatatgcaaaatgggtacaatctcagggactaaattgcctattcactctccttggaatatatgttttatggccaatgttcttctcaaaaatgatttttgcttcaatgatatgagcaccaagtcttgagatgataagcctagtaccattgcacaacccgtctttttgtgtcatattctgcagtaacataataagagtgccaaccttcaatttcattttgtgattaggtatcccagatgtgttaagtgagtttagaaattctggagtgattgtttcaaatgttggattttgaagtgcatctgatttgttgatactatcaacactataatattctttctcatctcaaggtatcaatgacatgacatactcatcgactttatcaataacttcaattgtagaggcaagtat

SEQ ID NO: 16339 - DNA, 1046 bp, Glycine max; identical to SEQ ID NO: 16338
  Gm_smallRNAprecursor_9172

SEQ ID NO: 16340 - DNA, 1046 bp, Glycine max; identical to SEQ ID NO: 16338
  Gm_smallRNAprecursor_9173

SEQ ID NO: 16341 - DNA, 1046 bp, Glycine max; identical to SEQ ID NO: 16338
  Gm_smallRNAprecursor_9174

SEQ ID NO: 16342 - DNA, 1044 bp, Glycine max
  Gm_smallRNAprecursor_9175
ccgtcaacaccaatgggcgaggtctgcataaccattctcttttcctcttttttttcttcaattaccatcaatatatcatttcgggttctgattttttgtgtgtgtgttttgaataggaagagaaaaaaccagaggaaaacaaagtgaaggagaaaaaagcaaatgaagaagaaaagaaagaagaagagaaaaaaccagaggaatcaaaagatgacaaggaatccaaggaggaatctgcgccgccagaaatcgtgctaggcacaacctttgcaatgcatggacactttaagcacgatttctggcatcttttaagttaaggactattttgcaacacttatgcaaaagatagggactattttgaatttttcattaagttagggactaatatgcaacaagggtacaaagttagggactaaattacctatttactcattttgttatcatcaaatgatgtggcatcttttaggaggcacgtccacgtgtcatgccacatcatcctttagtgccacgttggatagttcacgtgacaccaaaattgacctcactaacggcgttactttaaaatttaacggaaatactattttgcaacacttttgcaaagatagggactattttgaatttaatattaagttagggactaatatgcaaaatgggtacaatctcagggactaaattgcctattcactctccttggaatatatgttttatggccaatgttcttctcaaaaatgatttttgcttcaatgatatgagcaccaagtcttgagatgataagcctagtaccattgcacaacccgtctttttgtgtcatattctgcagtaacataataagagtgccaaccttcaatttcattttgtgattaggtatcccagatgtgttaagtgagtttagaaattctggagtgattgtttcaaatgttggattttgaagtgcatctgatttgttgatactatcaacactataatattctttctcatctcaaggtatcaatgacatgacatactcatcgactttatcaataacttcaattgtagaggcaagta

SEQ ID NO: 16343 - DNA, 1044 bp, Glycine max; identical to SEQ ID NO: 16342
  Gm_smallRNAprecursor_9176

SEQ ID NO: 16344 - DNA, 1078 bp, Glycine max
  Gm_smallRNAprecursor_9177
gtgtatcaattgggagactatgtgaaagcaagataatgtgtcatttattagccgtgtttgctatatatatagatggttgtgatcgagcaattgcttcactttgtttacaaaaaaatagacaaacgtgaacatgtttcatgtttatgtttcctttagaatgtgtagtcaagtcagtcaatgtgttgtcacgctcaaactttagtacgcatgcatgtcattatgtgttgtcaattatgacaatgatgtatactacatgcgtaaatgatttttgttggaccaacaatttttttgcttaacgaaatgagtacttaataatattaattggttagtaatggcttacaacaaattatatcgcataatgaatacaattacataaacaatgcatgtttagtcttcatttaggtcgacatagtgtcttttgaatgacatcaagcttgtgtattgctgcattctactaatatatggagttgtccactgctttgcttgagaataacaattgcttgaccacaacaacgctggaggcggtaagggacaatggtctttcaaataaacctgttgtacatgaacaaagattatatcatgcggtgaccgtgtcaaatgaaccagtgaagtcattgcataattgttatactaactatattcaatgtacctgaacaaaatgatttccaaacacgtggctgacacatatcatgcgatgcccagaagaatcaggtggtggttgacttctaagaggaaaaaatgtcatgctttgttgtcgggacaacgatacaaggattacgttatagcgtgatgcaatcacatatcccatctccgttatatccatccacttgtccacactaacctgaatcaaccaaacatacacatgtaagtaatttaaagtttgttattaaaaaaattaacctaaaaacataccttcgaaaacccatcaacaagtagggacatctttaattgttcaaatctctctgtgccaccgaagaggttcatgtactcatgcgaccacctgccaagttctttaatcaattcattacgcactaacggccacaaatcttcccccatacctaataaagcggcaatggac

SEQ ID NO: 16345 - DNA, 11315 bp, Artificial sequence
  RWT200 vector sequence
acgcaagctgttttactcaaatacacatcacctttttagatgatcagtgattttgtgccgagctgccggtcggggagctgttggctggctggtggcaggatatattgtggtgtaaacaaattgacgcttagacaacttaataacacattgcggacgtctttaatgtactgaatttagttactgatcactgattaagtactgatatcggtaccaattcgaatccaaaaattacggatatgaatataggcatatccgtatccgaattatccgtttgacagctagcaacgattgtacaattgcttctttaaaaaaggaagaaagaaagaaagaaaagaatcaacatcagcgttaacaaacggccccgttacggcccaaacggtcatatagagtaacggcgttaagcgttgaaagactcctatcgaaatacgtaaccgcaaacgtgtcatagtcagatcccctcttccttcaccgcctcaaacacaaaaataatcttctacagcctatatatacaacccccccttctatctctcctttctcacaattcatcatctttctttctctacccccaattttaagaaatcctctcttctcctcttcattttcaaggtaaatctctctctctctctctctctctgttattccttgttttaattaggtatgtattattgctagtttgttaatctgcttatcttatgtatgccttatgtgaatatctttatcttgttcatctcatccgtttagaagctataaatttgttgatttgactgtgtatctacacgtggttatgtttatatctaatcagatatgaatttcttcatattgttgcgtttgtgtgtaccaatccgaaatcgttgatttttttcatttaatcgtgtagctaattgtacgtatacatatggatctacgtatcaattgttcatctgtttgtgtttgtatgtatacagatctgaaaacatcacttctctcatctgattgtgttgttacatacatagatatagatctgttatatcattttttttattaattgtgtatatatatatgtgcatagatctggattacatgattgtgattatttacatgattttgttatttacgtatgtatatatgtagatctggactttttggagttgttgacttgattgtatttgtgtgtgtatatgtgtgttctgatcttgatatgttatgtatgtgcagctgaaccatggcggcggcaacaacaacaacaacaacatcttcttcgatctccttctccaccaaaccatctccttcctcctccaaatcaccattaccaatctccagattctccctcccattctccctaaaccccaacaaatcatcctcctcctcccgccgccgcggtatcaaatccagctctccctcctccatctccgccgtgctcaacacaaccaccaatgtcacaaccactccctctccaaccaaacctaccaaacccgaaacattcatctcccgattcgctccagatcaaccccgcaaaggcgctgatatcctcgtcgaagctttagaacgtcaaggcgtagaaaccgtattcgcttaccctggaggtacatcaatggagattcaccaagccttaacccgctcttcctcaatccgtaacgtccttcctcgtcacgaacaaggaggtgtattcgcagcagaaggatacgctcgatcctcaggtaaaccaggtatctgtatagccacttcaggtcccggagctacaaatctcgttagcggattagccgatgcgttgttagatagtgttcctcttgtagcaatcacaggacaagtccctcgtcgtatgattggtacagatgcgtttcaagagactccgattgttgaggtaacgcgttcgattacgaagcataactatcttgtgatggatgttgaagatatccctaggattattgaggaagctttctttttagctacttctggtagacctggacctgttttggttgatgttcctaaagatattcaacaacagcttgcgattcctaattgggaacaggctatgagattacctggttatatgtctaggatgcctaaacctccggaagattctcatttggagcagattgttaggttgatttctgagtctaagaagcctgtgttgtatgttggtggtggttgtttgaattctagcgatgaattgggtaggtttgttgagcttacggggatccctgttgcgagtacgttgatggggctgggatcttatccttgtgatgatgagttgtcgttacatatgcttggaatgcatgggactgtgtatgcaaattacgctgtggagcatagtgatttgttgttggcgtttggggtaaggtttgatgatcgtgtcacgggtaagcttgaggcttttgctagtagggctaagattgttcatattgatattgactcggctgagattgggaagaataagactcctcatgtgtctgtgtgtggtgatgttaagctggctttgcaagggatgaataaggttcttgagaaccgagcggaggagcttaagcttgattttggagtttggaggaatgagttgaacgtacagaaacagaagtttccgttgagctttaagacgtttggggaagctattcctccacagtatgcgattaaggtccttgatgagttgactgatggaaaagccataataagtactggtgtcgggcaacatcaaatgtgggcggcgcagttctacaattacaagaaaccaaggcagtggctatcatcaggaggccttggagctatgggatttggacttcctgctgcgattggagcgtctgttgctaaccctgatgcgatagttgtggatattgacggagatggaagctttataatgaatgtgcaagagctagccactattcgtgtagagaatcttccagtgaaggtacttttattaaacaaccagcatcttggcatggttatgcaatgggaagatcggttctacaaagctaaccgagctcacacatttctcggggatccggctcaggaggacgagatattcccgaacatgttgctgtttgcagcagcttgcgggattccagcggcgagggtgacaaagaaagcagatctccgagaagctattcagacaatgctggatacaccaggaccttacctgttggatgtgatttgtccgcaccaagaacatgtgttgccgatgatcccgaatggtggcactttcaacgatgtcataacggaaggagatggccggattaaatactgagagatgaaaccggtgattatcagaaccttttatggtctttgtatgcatatggtaaaaaaacttagtttgcaatttcctgtttgttttggtaatttgagtttcttttagttgttgatctgcctgctttttggtttacgtcagactactactgctgttgttgtttggtttcctttctttcattttataaataaataatccggttcggtttactccttgtgactggctcagtttggttattgcgaaatgcgaatggtaaattgagtaattgaaattcgttattagggttctaagctgttttaacagtcactgggttaatatctctcgaatcttgcatggaaaatgctcttaccattggtttttaattgaaatgtgctcatatgggccgtggtttccaaattaaataaaactacgatgtcatcgagaagtaaaatcaactgtgtccacattatcagttttgtgtatacgatgaaatagggtaattcaaaatctagcttgatatgccttttggttcattttaaccttctgtaaacattttttcagattttgaacaagtaaatccaaaaaaaaaaaaaaaaaatctcaactcaacactaaattattttaatgtataaaagatgcttaaaacatttggcttaaaagaaagaagctaaaaacatagagaactcttgtaaattgaagtatgaaaatatactgaattgggtattatatgaatttttctgatttaggattcacatgatccaaaaaggaaatccagaagcactaatcagacattggaagtaggaatatttcaaaaagttttttttttttaagtaagtgacaaaagcttttaaaaaatagaaaagaaactagtattaaagttgtaaatttaataaacaaaagaaattttttatattttttcatttctttttccagcatgaggttatgatggcaggatgtggatttcatttttttccttttgatagccttttaattgatctattataattgacgaaaaaatattagttaattatagatatattttaggtagtattagcaatttacacttccaaaagactatgtaagttgtaaatatgatgcgttgatctcttcatcattcaatggttagtcaaaaaaataaaagcttaactagtaaactaaagtagtcaaaaattgtactttagtttaaaatattacatgaataatccaaaacgacatttatgtgaaacaaaaacaatatctagtacgcgtcaattgatttaaatttaattaatcgactctagattcgacggtatcgataagctcgcggatccctgaaagcgacgttggatgttaacatctacaaattgccttttcttatcgaccatgtacgtaagcgcttacgtttttggtggacccttgaggaaactggtagctgttgtgggcctgtggtctcaagatggatcattaatttccaccttcacctacgatggggggcatcgcaccggtgagtaatattgtacggctaagagcgaatttggcctgtaggatccctgaaagcgacgttggatgttaacatctacaaattgccttttcttatcgaccatgtacgtaagcgcttacgtttttggtggacccttgaggaaactggtagctgttgtgggcctgtggtctcaagatggatcattaatttccaccttcacctacgatggggggcatcgcaccggtgagtaatattgtacggctaagagcgaatttggcctgtaggatccctgaaagcgacgttggatgttaacatctacaaattgccttttcttatcgaccatgtacgtaagcgcttacgtttttggtggacccttgaggaaactggtagctgttgtgggcctgtggtctcaagatggatcattaatttccaccttcacctacgatggggggcatcgcaccggtgagtaatattgtacggctaagagcgaatttggcctgtaggatccgcgagctggtcaatcccattgcttttgaagcagctcaacattgatctctttctcgatcgagggagatttttcaaatcagtgcgcaagacgtgacgtaagtatccgagtcagtttttatttttctactaatttggtcgtttatttcggcgtgtaggacatggcaaccgggcctgaatttcgcgggtattctgtttctattccaactttttcttgatccgcagccattaacgacttttgaatagatacgctgacacgccaagcctcgctagtcaaaagtgtaccaaacaacgctttacagcaagaacggaatgcgcgtgacgctcgcggtgacgccatttcgccttttcagaaatggataaatagccttgcttcctattatatcttcccaaattaccaatacattacactagcatctgaatttcataaccaatctcgatacaccaaatcgaggcgcgccatatgcactcaattcaacaataaaactaacaaagatgacaataaaagtaatagtgtcaattaaaactaattaaaattgattactgcaacaaaagaactttcctaaaaggtcaaaaaagcaaagttcatttcaacctcaccttcgtgatgcacacaaattaagtatggatctaatcatgcacatacctcggacaaggttactccacagcaagaacgggatcatggcaaaagagaaaaacggaaaaacttcaaaaaaaacatttaaagtttagagtctataacaaatttaaattattatgagagaaaagaagagaagggtggaaggttaatactataaaggcaaatgaagctccccaaatatggaagccacaagactaccacaaaagcacttattgatgggtagaactgtgggatccatagctaagcagctcaattcacccagtaagatcctcaattggacttcaaggagctccacttcataatcccctttaattaatgtttccctttgaactataataataaggtcaaaacgtaacctaaccaaaaactttgcaactttattacactcactacccaaaccctagctagctagaaccaccccacaaagaaaaacaccaaagcaccaagaccatgaacctcatcacaaagactcatatctacataaccacacccaaataggaactagaaacctgatctgaagctctcatcatctggataagaacatgaaactccaaggcaaactaacaacacaacacaaagcaaactagatctgagatctagcctgcaggcctaggatcgttcaaacatttggcaataaagtttcttaagattgaatcctgttgccggtcttgcgatgattatcatataatttctgttgaattacgttaagcatgtaataattaacatgtaatgcatgacgttatttatgagatgggtttttatgattagagtcccgcaattatacatttaatacgcgatagaaaacaaaatatagcgcgcaaactaggataaattatcgcgcgcggtgtcatctatgttactagatcggccggccgtttaaacttagttactaatcagtgatcagattgtcgtttcccgccttcactttaaactatcagtgtttgacaggatatattggcgggtaaacctaagagaaaagagcgtttattagaataatcggatatttaaaagggcgtgaaaaggtttatccgttcgtccatttgtatgtcaatattgggggggggggaaagccacgttgtgtctcaaaatctctgatgttacattgcacaagataaaaatatatcatcatgaacaataaaactgtctgcttacataaacagtaatacaaggggtgttcgccaccatgagccatatccagcgtgaaacctcgtgctcccgcccgcgcctcaattccaatatggatgccgacctttatggctacaagtgggcgcgcgacaacgtcggccagtcgggcgcgaccatttatcggctttatggcaaacccgatgccccggaactgttcctgaagcacggcaaaggcagcgtcgcaaacgatgtcaccgatgagatggtccgcctgaactggcttaccgagttcatgccgctgccgacgattaagcatttcatccgtaccccggacgatgcctggctcttgaccacggccattccgggcaaaacggcctttcaggtccttgaagagtacccggactccggtgagaatatcgtggacgccctcgcggtcttcctccgccgtttgcatagcatccccgtgtgcaactgccccttcaactcggaccgggttttccgcctggcacaggcccagtcgcgcatgaataacggcctcgttgacgcgagcgatttcgacgatgaacggaatggctggccggtggaacaggtttggaaggaaatgcacaaactgcttccgttctcgccggattcggtggtcacgcatggtgatttttccctggataatctgatctttgacgagggcaagctgatcggctgcatcgacgtgggtcgcgtcggtatcgccgaccgctatcaggacctggcgatcttgtggaattgcctcggcgagttctcgccctcgctccagaagcgcctgttccagaagtacggcatcgacaacccggatatgaacaagctccagttccacctcatgctggacgaatttttttgaacagaattggttaattggttgtaacactggcagagcattacgctgacttgacgggacggcggctttgttgaataaatcgaacttttgctgagttgaaggatcgatgagttgaaggaccccgtagaaaagatcaaaggatcttcttgagatcctttttttctgcgcgtaatctgctgcttgcaaacaaaaaaaccaccgctaccagcggtggtttgtttgccggatcaagagctaccaactctttttccgaaggtaactggcttcagcagagcgcagataccaaatactgtccttctagtgtagccgtagttaggccaccacttcaagaactctgtagcaccgcctacatacctcgctctgctaatcctgttaccagtggctgctgccagtggcgataagtcgtgtcttaccgggttggactcaagacgatagttaccggataaggcgcagcggtcgggctgaacggggggttcgtgcacacagcccagcttggagcgaacgacctacaccgaactgagatacctacagcgtgagctatgagaaagcgccacgcttcccgaagggagaaaggcggacaggtatccggtaagcggcagggtcggaacaggagagcgcacgagggagcttccagggggaaacgcctggtatctttatagtcctgtcgggtttcgccacctctgacttgagcgtcgatttttgtgatgctcgtcaggggggcggagcctatggaaaaacgccagcaacgcggcctttttacggttcctggccttttgctggccttttgctcacatgttctttcctgcgttatcccctgattctgtggataaccgtattaccgcctttgagtgagctgataccgctcgccgcagccgaacgaccgagcgcagcgagtcagtgagcgaggaagcggaagagcgcctgatgcggtattttctccttacgcatctgtgcggtatttcacaccgcataggccgcgataggccgacgcgaagcggcggggcgtagggagcgcagcgaccgaagggtaggcgctttttgcagctcttcggctgtgcgctggccagacagttatgcacaggccaggcgggttttaagagttttaataagttttaaagagttttaggcggaaaaatcgccttttttctcttttatatcagtcacttacatgtgtgaccggttcccaatgtacggctttgggttcccaatgtacgggttccggttcccaatgtacggctttgggttcccaatgtacgtgctatccacaggaaagagaccttttcgacctttttcccctgctagggcaatttgccctagcatctgctccgtacattaggaaccggcggatgcttcgccctcgatcaggttgcggtagcgcatgactaggatcgggccagcctgccccgcctcctccttcaaatcgtactccggcaggtcatttgacccgatcagcttgcgcacggtgaaacagaacttcttgaactctccggcgctgccactgcgttcgtagatcgtcttgaacaaccatctggcttctgccttgcctgcggcgcggcgtgccaggcggtagagaaaacggccgatgccggggtcgatcaaaaagtaatcggggtgaaccgtcagcacgtccgggttcttgccttctgtgatctcgcggtacatccaatcagcaagctcgatctcgatgtactccggccgcccggtttcgctctttacgatcttgtagcggctaatcaaggcttcaccctcggataccgtcaccaggcggccgttcttggccttcttggtacgctgcatggcaacgtgcgtggtgtttaaccgaatgcaggtttctaccaggtcgtctttctgctttccgccatcggctcgccggcagaacttgagtacgtccgcaacgtgtggacggaacacgcggccgggcttgtctcccttcccttcccggtatcggttcatggattcggttagatgggaaaccgccatcagtaccaggtcgtaatcccacacactggccatgccggcggggcctgcggaaacctctacgtgcccgtctggaagctcgtagcggatcacctcgccagctcgtcggtcacgcttcgacagacggaaaacggccacgtccatgatgctgcgactatcgcgggtgcccacgtcatagagcatcggaacgaaaaaatctggttgctcgtcgcccttgggcggcttcctaatcgacggcgcaccggctgccggcggttgccgggattctttgcggattcgatcagcggccccttgccacgattcaccggggcgtgcttctgcctcgatgcgttgccgctgggcggcctgcgcggccttcaacttctccaccaggtcatcacccagcgccgcgccgatttgtaccgggccggatggtttgcgaccgctcacgccgattcctcgggcttgggggttccagtgccattgcagggccggcagacaacccagccgcttacgcctggccaaccgcccgttcctccacacatggggcattccacggcgtcggtgcctggttgttcttgattttccatgccgcctcctttagccgctaaaattcatctactcatttattcatttgctcatttactctggtagctgcgcgatgtattcagatagcagctcggtaatggtcttgccttggcgtaccgcgtacatcttcagcttggtgtgatcctccgccggcaactgaaagttgacccgcttcatggctggcgtgtctgccaggctggccaacgttgcagccttgctgctgcgtgcgctcggacggccggcacttagcgtgtttgtgcttttgctcattttctctttacctcattaactcaaatgagttttgatttaatttcagcggccagcgcctggacctcgcgggcagcgtcgccctcgggttctgattcaagaacggttgtgccggcggcggcagtgcctgggtagctcacgcgctgcgtgatacgggactcaagaatgggcagctcgtacccggccagcgcctcggcaacctcaccgccgatgcgcgtgcctttgatcgcccgcgacacgacaaaggccgcttgtagccttccatccgtgacctcaatgcgctgcttaaccagctccaccaggtcggcggtggcccaaatgtcgtaagggcttggctgcaccggaatcagcacgaagtcggctgccttgatcgcggacacagccaagtccgccgcctggggcgctccgtcgatcactacgaagtcgcgccggccgatggccttcacgtcgcggtcaatcgtcgggcggtcgatgccgacaacggttagcggttgatcttcccgcacggccgcccaatcgcgggcactgccctggggatcggaatcgactaacagaacatcggccccggcgagttgcagggcgcgggctagatgggttgcgatggtcgtcttgcctgacccgcctttctggttaagtacagcgataaccttcatgcgttccccttgcgtatttgtttatttactcatcgcatcatatacgcagcgaccgcatg

SEQ ID NO: 16346 - DNA, 11685 bp, Artificial sequence
  RWT201 vector sequence
ccccggagatcttcgatttggtgtatcgagattggttatgaaattcagatgctagtgtaatgtattggtaatttgggaagatataataggaagcaaggctatttatccatttctgaaaaggcgaaatggcgtcaccgcgagcgtcacgcgcattccgttcttgctgtaaagcgttgtttggtacacttttgactagcgaggcttggcgtgtcagcgtatctattcaaaagtcgttaatggctgcggatcaagaaaaagttggaatagaaacagaatacccgcgaaattcaggcccggttgccatgtcctacacgccgaaataaacgaccaaattagtagaaaaataaaaactgactcggatacttacgtcacgtcttgcgcactgatttgaaaaatctccctcgatcgagaaagagatcaatgttgagctgcttcaaaagcaatgggattgaccagctcgcggatcctacaggccaaattcgctcttagccgtacaatattactcaccggtgcgatgccccccatcgtaggtgaaggtggaaattaatgatccatcttgagaccacaggcccacaacagctaccagtttcctcaagggtccaccaaaaacgtaagcgcttacgtacatggtcgataagaaaaggcaatttgtagatgttaacatccaacgtcgctttcagggatcctacaggccaaattcgctcttagccgtacaatattactcaccggtgcgatgccccccatcgtaggtgaaggtggaaattaatgatccatcttgagaccacaggcccacaacagctaccagtttcctcaagggtccaccaaaaacgtaagcgcttacgtacatggtcgataagaaaaggcaatttgtagatgttaacatccaacgtcgctttcagggatcctacaggccaaattcgctcttagccgtacaatattactcaccggtgcgatgccccccatcgtaggtgaaggtggaaattaatgatccatcttgagaccacaggcccacaacagctaccagtttcctcaagggtccaccaaaaacgtaagcgcttacgtacatggtcgataagaaaaggcaatttgtagatgttaacatccaacgtcgctttcagggatccgcgagcttatcgataccgtcgaatctagaactagcgggggggggatccagcgatcgcgattgtcgtttcccgccttcagtttaaactatcagtgtttgacaggatatattggcgggtaaacctaagagaaaagagcgtttattagaataatcggatatttaaaagggcgtgaaaaggtttatccgttcgtccatttgtatgtcaatattgggggggggggaaagccacgttgtgtctcaaaatctctgatgttacattgcacaagataaaaatatatcatcatgaacaataaaactgtctgcttacataaacagtaatacaaggggtgttcgccaccatgagccatatccagcgtgaaacctcgtgctcccgcccgcgcctcaattccaatatggatgccgacctttatggctacaagtgggcgcgcgacaacgtcggccagtcgggcgcgaccatttatcggctttatggcaaacccgatgccccggaactgttcctgaagcacggcaaaggcagcgtcgcaaacgatgtcaccgatgagatggtccgcctgaactggcttaccgagttcatgccgctgccgacgattaagcatttcatccgtaccccggacgatgcctggctcttgaccacggccattccgggcaaaacggcctttcaggtccttgaagagtacccggactccggtgagaatatcgtggacgccctcgcggtcttcctccgccgtttgcatagcatccccgtgtgcaactgccccttcaactcggaccgggttttccgcctggcacaggcccagtcgcgcatgaataacggcctcgttgacgcgagcgatttcgacgatgaacggaatggctggccggtggaacaggtttggaaggaaatgcacaaactgcttccgttctcgccggattcggtggtcacgcatggtgatttttccctggataatctgatctttgacgagggcaagctgatcggctgcatcgacgtgggtcgcgtcggtatcgccgaccgctatcaggacctggcgatcttgtggaattgcctcggcgagttctcgccctcgctccagaagcgcctgttccagaagtacggcatcgacaacccggatatgaacaagctccagttccacctcatgctggacgaatttttttgaacagaattggttaattggttgtaacactggcagagcattacgctgacttgacgggacggcggctttgttgaataaatcgaacttttgctgagttgaaggatcgatgagttgaaggaccccgtagaaaagatcaaaggatcttcttgagatcctttttttctgcgcgtaatctgctgcttgcaaacaaaaaaaccaccgctaccagcggtggtttgtttgccggatcaagagctaccaactctttttccgaaggtaactggcttcagcagagcgcagataccaaatactgtccttctagtgtagccgtagttaggccaccacttcaagaactctgtagcaccgcctacatacctcgctctgctaatcctgttaccagtggctgctgccagtggcgataagtcgtgtcttaccgggttggactcaagacgatagttaccggataaggcgcagcggtcgggctgaacggggggttcgtgcacacagcccagcttggagcgaacgacctacaccgaactgagatacctacagcgtgagctatgagaaagcgccacgcttcccgaagggagaaaggcggacaggtatccggtaagcggcagggtcggaacaggagagcgcacgagggagcttccagggggaaacgcctggtatctttatagtcctgtcgggtttcgccacctctgacttgagcgtcgatttttgtgatgctcgtcaggggggcggagcctatggaaaaacgccagcaacgcggcctttttacggttcctggccttttgctggccttttgctcacatgttctttcctgcgttatcccctgattctgtggataaccgtattaccgcctttgagtgagctgataccgctcgccgcagccgaacgaccgagcgcagcgagtcagtgagcgaggaagcggaagagcgcctgatgcggtattttctccttacgcatctgtgcggtatttcacaccgcataggccgcgataggccgacgcgaagcggcggggcgtagggagcgcagcgaccgaagggtaggcgctttttgcagctcttcggctgtgcgctggccagacagttatgcacaggccaggcgggttttaagagttttaataagttttaaagagttttaggcggaaaaatcgccttttttctcttttatatcagtcacttacatgtgtgaccggttcccaatgtacggctttgggttcccaatgtacgggttccggttcccaatgtacggctttgggttcccaatgtacgtgctatccacaggaaagagaccttttcgacctttttcccctgctagggcaatttgccctagcatctgctccgtacattaggaaccggcggatgcttcgccctcgatcaggttgcggtagcgcatgactaggatcgggccagcctgccccgcctcctccttcaaatcgtactccggcaggtcatttgacccgatcagcttgcgcacggtgaaacagaacttcttgaactctccggcgctgccactgcgttcgtagatcgtcttgaacaaccatctggcttctgccttgcctgcggcgcggcgtgccaggcggtagagaaaacggccgatgccggggtcgatcaaaaagtaatcggggtgaaccgtcagcacgtccgggttcttgccttctgtgatctcgcggtacatccaatcagcaagctcgatctcgatgtactccggccgcccggtttcgctctttacgatcttgtagcggctaatcaaggcttcaccctcggataccgtcaccaggcggccgttcttggccttcttggtacgctgcatggcaacgtgcgtggtgtttaaccgaatgcaggtttctaccaggtcgtctttctgctttccgccatcggctcgccggcagaacttgagtacgtccgcaacgtgtggacggaacacgcggccgggcttgtctcccttcccttcccggtatcggttcatggattcggttagatgggaaaccgccatcagtaccaggtcgtaatcccacacactggccatgccggcggggcctgcggaaacctctacgtgcccgtctggaagctcgtagcggatcacctcgccagctcgtcggtcacgcttcgacagacggaaaacggccacgtccatgatgctgcgactatcgcgggtgcccacgtcatagagcatcggaacgaaaaaatctggttgctcgtcgcccttgggcggcttcctaatcgacggcgcaccggctgccggcggttgccgggattctttgcggattcgatcagcggccccttgccacgattcaccggggcgtgcttctgcctcgatgcgttgccgctgggcggcctgcgcggccttcaacttctccaccaggtcatcacccagcgccgcgccgatttgtaccgggccggatggtttgcgaccgctcacgccgattcctcgggcttgggggttccagtgccattgcagggccggcagacaacccagccgcttacgcctggccaaccgcccgttcctccacacatggggcattccacggcgtcggtgcctggttgttcttgattttccatgccgcctcctttagccgctaaaattcatctactcatttattcatttgctcatttactctggtagctgcgcgatgtattcagatagcagctcggtaatggtcttgccttggcgtaccgcgtacatcttcagcttggtgtgatcctccgccggcaactgaaagttgacccgcttcatggctggcgtgtctgccaggctggccaacgttgcagccttgctgctgcgtgcgctcggacggccggcacttagcgtgtttgtgcttttgctcattttctctttacctcattaactcaaatgagttttgatttaatttcagcggccagcgcctggacctcgcgggcagcgtcgccctcgggttctgattcaagaacggttgtgccggcggcggcagtgcctgggtagctcacgcgctgcgtgatacgggactcaagaatgggcagctcgtacccggccagcgcctcggcaacctcaccgccgatgcgcgtgcctttgatcgcccgcgacacgacaaaggccgcttgtagccttccatccgtgacctcaatgcgctgcttaaccagctccaccaggtcggcggtggcccaaatgtcgtaagggcttggctgcaccggaatcagcacgaagtcggctgccttgatcgcggacacagccaagtccgccgcctggggcgctccgtcgatcactacgaagtcgcgccggccgatggccttcacgtcgcggtcaatcgtcgggcggtcgatgccgacaacggttagcggttgatcttcccgcacggccgcccaatcgcgggcactgccctggggatcggaatcgactaacagaacatcggccccggcgagttgcagggcgcgggctagatgggttgcgatggtcgtcttgcctgacccgcctttctggttaagtacagcgataaccttcatgcgttccccttgcgtatttgtttatttactcatcgcatcatatacgcagcgaccgcatgacgcaagctgttttactcaaatacacatcacctttttagatgatcagtgattttgtgccgagctgccggtcggggagctgttggctggctggtggcaggatatattgtggtgtaaacaaattgacgcttagacaacttaataacacattgcggacgtttttaatgtactgaattagtactctagtttacagcactcgtctccgtcttggtaggttctttgagcttaagaaggttgacgttgtggtgataggtctaaggcggaggctaggctagttgctctagatattgtttttgtttcacataaatgtcgttttggattattcatgtaatattttaaactaaagtacaatttttgactactttagtttactagttaagcttttatttttttgactaaccattgaatgatgaagagatcaacgcatcatatttacaacttacatagtcttttggaagtgtaaattgctaatactacctaaaatatatctataattaactaatattttttcgtcaattataatagatcaattaaaaggctatcaaaaggaaaaaaatgaaatccacatcctgccatcataacctcatgctggaaaaagaaatgaaaaaatataaaaaatttcttttgtttattaaatttacaactttaatactagtttcttttctattttttaaaagcttttgtcacttacttaaaaaaaaaaaactttttgaaatattcctacttccaatgtctgattagtgcttctggatttcctttttggatcatgtgaatcctaaatcagaaaaattcatataatacccaattcagtatattttcatacttcaatttacaagagttctctatgtttttagcttctttcttttaagccaaatgttttaagcatcttttatacattaaaataatttagtgttgagttgagattttttttttttttttttggatttacttgttcaaaatctgaaaaaatgtttacagaaggttaaaatgaaccaaaaggcatatcaagctagattttgaattaccctatttcatcgtatacacaaaactgataatgtggacacagttgattttacttctcgatgacatcgtagttttatttaatttggaaaccacggcccatatgagcacatttcaattaaaaaccaatggtaagagcattttccatgcaagattcgagagatattaacccagtgactgttaaaacagcttagaaccctaataacgaatttcaattactcaatttaccattcgcatttcgcaataaccaaactgagccagtcacaaggagtaaaccgaaccggattatttatttataaaatgaaagaaaggaaaccaaacaacaacagcagtagtagtctgacgtaaaccaaaaagcaggcagatcaacaactaaaagaaactcaaattaccaaaacaaacaggaaattgcaaactaagtttttttaccatatgcatacaaagaccataaaaggttctgataatcaccggtttcatctctcagtatttaatccggccatctccttccgttatgacatcgttgaaagtgccaccattcgggatcatcggcaacacatgttcttggtgcggacaaatcacatccaacaggtaaggtcctggtgtatccagcattgtctgaatagcttctcggagatctgctttctttgtcaccctcgccgctggaatcccgcaagctgctgcaaacagcaacatgttcgggaatatctcgtcctcctgagccggatccccgagaaatgtgtgagctcggttagctttgtagaaccgatcttcccattgcataaccatgccaagatgctggttgtttaataaaagtaccttcactggaagattctctacacgaatagtggctagctcttgcacattcattataaagcttccatctccgtcaatatccacaactatcgcatcagggttagcaacagacgctccaatcgcagcaggaagtccaaatcccatagctccaaggcctcctgatgatagccactgccttggtttcttgtaattgtagaactgcgccgcccacatttgatgttgcccgacaccagtacttattatggcttttccatcagtcaactcatcaaggaccttaatcgcatactgtggaggaatagcttccccaaacgtcttaaagctcaacggaaacttctgtttctgtacgttcaactcattcctccaaactccaaaatcaagcttaagctcctccgctcggttctcaagaaccttattcatcccttgcaaagccagcttaacatcaccacacacagacacatgaggagtcttattcttcccaatctcagccgagtcaatatcaatatgaacaatcttagccctactagcaaaagcctcaagcttacccgtgacacgatcatcaaaccttaccccaaacgccaacaacaaatcactatgctccacagcgtaatttgcatacacagtcccatgcattccaagcatatgtaacgacaactcatcatcacaaggataagatcccagccccatcaacgtactcgcaacagggatccccgtaagctcaacaaacctacccaattcatcgctagaattcaaacaaccaccaccaacatacaacacaggcttcttagactcagaaatcaacctaacaatctgctccaaatgagaatcttccggaggtttaggcatcctagacatataaccaggtaatctcatagcctgttcccaattaggaatcgcaagctgttgttgaatatctttaggaacatcaaccaaaacaggtccaggtctaccagaagtagctaaaaagaaagcttcctcaataatcctagggatatcttcaacatccatcacaagatagttatgcttcgtaatcgaacgcgttacctcaacaatcggagtctcttgaaacgcatctgtaccaatcatacgacgagggacttgtcctgtgattgctacaagaggaacactatctaacaacgcatcggctaatccgctaacgagatttgtagctccgggacctgaagtggctatacagatacctggtttacctgaggatcgagcgtatccttctgctgcgaatacacctccttgttcgtgacgaggaaggacgttacggattgaggaagagcgggttaaggcttggtgaatctccattgatgtacctccagggtaagcgaatacggtttctacgccttgacgttctaaagcttcgacgaggatatcagcgcctttgcggggttgatctggagcgaatcgggagatgaatgtttcgggtttggtaggtttggttggagagggagtggttgtgacattggtggttgtgttgagcacggcggagatggaggagggagagctggatttgataccgcggcggcgggaggaggaggatgatttgttggggtttagggagaatgggagggagaatctggagattggtaatggtgatttggaggaggaaggagatggtttggtggagaaggagatcgaagaagatgttgttgttgttgttgttgccgccgccatggttcagctgcacatacataacatatcaagatcagaacacacatatacacacacaaatacaatcaagtcaacaactccaaaaagtccagatctacatatatacatacgtaaataacaaaatcatgtaaataatcacaatcatgtaatccagatctatgcacatatatatatacacaattaataaaaaaaatgatataacagatctatatctatgtatgtaacaacacaatcagatgagagaagtgatgttttcagatctgtatacatacaaacacaaacagatgaacaattgatacgtagatccatatgtatacgtacaattagctacacgattaaatgaaaaaaatcaacgatttcggattggtacacacaaacgcaacaatatgaagaaattcatatctgattagatataaacataaccacgtgtagatacacagtcaaatcaacaaatttatagcttctaaacggatgagatgaacaagataaagatattcacataaggcatacataagataagcagattaacaaactagcaataatacatacctaattaaaacaaggaataacagagagagagagagagagagagatttaccttgaaaatgaagaggagaagagaggatttcttaaaattgggggtagagaaagaaagatgatgaattgtgagaaaggagagatagaagggggggttgtatatataggctgtagaagattatttttgtgtttgaggcggtgaaggaagaggggatctgactatgacacgtttgcggttacgtatttcgataggagtctttcaacgcttaacgccgttactctatatgaccgtttgggccgtaacggggccgtttgttaacgctgatgttgattcttttctttctttctttcttccttttttaaagaagcaattgtacaatcgttgctagctgtcaaacggataattcggatacggatatgcctatattcatatccgtaatttttggattcgaattggtacccccacgtgatttaaatactagtgatctagtaacatagatgacaccgcgcgcgataatttatcctagtttgcgcgctatattttgttttctatcgcgtattaaatgtataattgcgggactctaatcataaaaacccatctcataaataacgtcatgcattacatgttaattattacatgcttaacgtaattcaacagaaattatatgataatcatcgcaagaccggcaacaggattcaatcttaagaaactttattgccaaatgtttgaacgatccaattggaattcccttaattaaacaaaagaactttcctaaaaggtcaaaaaagcaaagttcatttcaacctcaccttcgtgatgcacacaaattaagtatggatctaatcatgcacatacctcggacaaggttactccacagcaagaacgggatcatggcaaaagagaaaaacggaaaaacttcaaaaaaaacatttaaagtttagagtctataacaaatttaaattattatgagagaaaagaagagaagggtggaaggttaatactataaaggcaaatgaagctccccaaatatggaagccacaagactaccacaaaagcacttattgatgggtagaactgtgggatccatagctaagcagctcaattcacccagtaagatcctcaattggacttcaaggagctccacttcataatcccctctcgagcgaatttgaagactgcgaccgccatttggaggaagttcttaagtccgacatcgacttcgccagcacagatctggacttcggcttcgagcttacgagcttggaccattgtagcgttgtgaccgagcatggctactctgtgagtctcttatccgagtttctcggggatccagagagctttcacgacgcaaagaggctgcaagagttagacgactcgctctcgtcaatgttgagtgaggttcgatcgagcggttcagactcggggagtaggcgcgccaggggattatgaagtggagctccttgaagtccaattgaggatcttactgggtgaattgagctgcttagctatggatcccacagttctacccatcaataagtgcttttgtggtagtcttgtggcttccatatttggggagcttcatttgcctttatagtattaaccttccacccttctcttcttttctctcataataatttaaatttgttatagactctaaactttaaatgttttttttgaagtttttccgtttttctcttttgccatgatcccgttcttgctgtggagtaaccttgtccgaggtatgtgcatgattagatccatacttaatttgtgtgcatcacgaaggtgaggttgaaatgaactttgcttttttgaccttttaggaaagttcttttgtgacgt
